(19) United States
(12) Patent Application Publication
(10) Pub. No.: US 2008/0025966 A1
(43) Pub. Date: Jan. 31, 2008

(54) Methods And Compositions For The Treatment Of Gastrointestinal disorders

(76) Inventor: Mark G. Currie, Sterling, MA (US)

Correspondence Address: FISH & RICHARDSON PC, P.O. BOX 1022, MINNEAPOLIS, MN, 55440-1022, US

(21) Appl. No.: 10/587,450

(22) PCT Filed: Jan. 31, 2005
(86) PCT No.: PCT/US05/02941

§ 371 Date: Apr. 12, 2007

Related U.S. Application Data
(60) Provisional application No. 60/540,675, filed on Jan. 30, 2004.

(51) Int. Cl. A61K 38/48; A61P 1/00; A61P 1/12

(52) U.S. Cl. 424/94.64

(57) ABSTRACT

The use of chymotrypsin inhibitors for treating various disorders, including IBS and other gastrointestinal disorders and conditions (e.g., gastrointestinal motility disorders, functional gastrointestinal disorders, gastroesophageal reflux disease (GERD), Crohn's disease, ulcerative colitis, inflammatory bowel disease, functional heartburn, dyspepsia (including functional dyspepsia or nonulcer dyspepsia), gastroparesis, chronic intestinal pseudo-obstruction (or colonic pseudoobstruction), and disorders and conditions associated with constipation is described.

### TECHNICAL FIELD

[0001] This invention relates to methods and compositions for treating gastrointestinal disorders, obesity, congestive heart failure, benign prostatic hyperplasia and other disorders including hypertension and asthma.

### BACKGROUND

[0002] Irritable bowel syndrome (IBS) is a common chronic disorder of the intestine that affects 20 to 60 million individuals in the US alone (Lehman Brothers, Global Healthcare-Irritable Bowel Syndrome Industry Update, September 1999). IBS is the most common disorder diagnosed by gastroenterologists (28% of patients examined) and accounts for 12% of visits to primary care physicians (Camilleri 2001 Gastroenterology 120:652-668). In the US, the economic impact of IBS is estimated at $25 billion annually, through direct costs of health care use and indirect costs of absenteeism from work (Talley 1995 Gastroenterology 109:1736-1741). Patients with IBS have three times more absenteeism from work and report a reduced quality of life. Sufferers may be unable or unwilling to attend social events, maintain employment, or travel even short distances (Drossman 1993 Dig Dis Sci 38:1569-1580). There is a tremendous unmet medical need in this population since few prescription options exist to treat IBS.

[0003] Patients with IBS suffer from abdominal pain and a disturbed bowel pattern. Three subgroups of IBS patients have been defined based on the predominant bowel habit: constipation-predominant (c-IBS), diarrhea-predominant (d-IBS) or alternating between the two (a-IBS). Estimates of individuals who suffer from c-IBS range from 20-50% of the IBS patients with 30% frequently cited. In contrast to the other two subgroups that have a similar gender ratio, c-IBS is more common in women (ratio of 3:1) (Talley et al. 1995 Am J Epidemiol 142:76-83).

[0004] The definition and diagnostic criteria for IBS have been formalized in the “Rome Criteria” (Drossman et al. 1999 Gut 45:Suppl II:1-81), which are well accepted in clinical practice. However, the complexity of symptoms has not been explained by anatomical abnormalities or metabolic changes. This has led to the classification of IBS as a functional GI disorder, which is diagnosed on the basis of the Rome criteria and limited evaluation to exclude organic disease(Ringel et al. 2001 Annu Rev Med 52: 319-338). IBS is considered to be a “biopsychosocial” disorder resulting from a combination of three interacting mechanisms: altered bowel motility, an increased sensitivity of the intestine or colon to pain stimuli (visceral sensitivity) and psychosocial factors (Camilleri 2001 Gastroenterology 120:652-668). Recently, there has been increasing evidence for a role of inflammation in the etiology of IBS. Reports indicate that subsets of IBS patients have small but significant increases in colonic inflammatory and mast cells, increased inducible nitric oxide (NO) and synthase (iNOS) and altered expression of inflammatory cytokines (reviewed by Talley 2000, Medscape Coverage of DDW Week).

[0005] Guanylin is an intestinal peptide that stimulates chloride secretion. In humans, guanylin is produced initially as a 115 amino acid protein referred to as preproguanylin. The mature protein, which is believed to be the active form, has 15 amino acids. Guanylin is inactivated by cleavage by the serine protease, chymotrypsin, which is present in the gastrointestinal tract, and by a chymotrypsin-like enzyme that is present in the liver. Guanylin is an agonist of the transmembrane guanylate cyclase (GC-C) receptor. The GC-C receptor is present on the apical plasma membrane of enterocytes in intestinal tract and in other epithelia. Activation of the GC-C receptor by guanylin in the intestine increases cGMP levels. This increase in cGMP is believed to cause a decrease in water and sodium absorption and an increase in chloride and potassium ion secretion, leading to changes in intestinal fluid and electrolyte transport and increased intestinal motility. The intestinal GC-C receptor possesses an extracellular ligand binding region, a transmembrane region, an intracellular protein kinase-like region and a cyclase catalytic domain. Proposed functions for the GC-C receptor are fluid and electrolyte homeostasis, the regulation of epithelial cell proliferation and the induction of apoptosis (Shailubhai 2002 Curr Opin Drug Dis Devel 5:261-268). Other GC-C receptor agonists include uroguanylin, renoguanylin, lymphoguanylin and the E. coli heat stable ST peptide.

[0006] Diarrhea is a common complication in HIV patients. It appears that diarrhea is particularly common in patients treated with protease inhibitors (Sherman et al. 2000 Clin Infect Dis 30:908). Prolonged diarrhea impacts quality of life and can contribute to weight loss, malnutrition, immunosuppression, poor drug absorption, non-compliance with therapy and mortality. Oat bran, psyllium, loperamide, calcium carbonate, pancrelipase, and SP-303 have been shown to have some beneficial effect on diarrhea associated with the use of HIV protease inhibitors (Sherman et al., supra). Bode et al. (AIDS 13:2595, 1999) state that the cause of HIV protease inhibitor associated diarrhea is unknown. Bode et al. also report that saquinavir, ritonavir, and nelfinavir, but not indinavir, impair the epithelial barrier in human HT-29/B6 cells.

### SUMMARY

[0007] The present invention features compositions and related methods for treating IBS and other gastrointestinal disorders and conditions (e.g., gastrointestinal motility disorders, functional gastrointestinal disorders, gastroesophageal reflux disease (GERD), Crohn's disease, ulcerative colitis, inflammatory bowel disease, functional heartburn, dyspepsia (including functional dyspepsia or nonulcer dyspepsia), gastroparesis, chronic intestinal pseudo-obstruction (or colonic pseudoobstruction), and disorders and conditions associated with constipation, e.g., constipation associated with use of opiate pain killers, post-surgical constipation, and constipation associated with neuropathic disorders as well as other conditions and disorders.

[0008] The methods and the compositions in the invention relate to the administration of a compound that inhibits chymotrypsin activity. By interfering with the inactivation of guanylin in the intestinal tract caused by chymotrypsin cleavage of guanylin, a chymotrypsin inhibitor can potentiate the action of naturally-occurring guanylin, thereby increasing or regularizing intestinal motility. The invention also features the use of a chymotrypsin inhibitor in a combination therapy with therapeutically administered GC-C receptor agonist or some other treatment for a gastrointestinal disorder. In certain embodiments, the GC-C receptor agonist is guanylin or a biologically active variant or fragment thereof.

[0009] The present invention also features compositions and related methods for treating obesity, congestive heart failure and benign prostatic hyperplasia (BPH).

[0010] Without being bound by any particular theory, in the case of IBS and other gastrointestinal disorders the compositions of the invention are useful because they can increase or regularize gastrointestinal motility by potentiating guanylin activity.

[0011] Without being bound by any particular theory, in the case of IBS and other gastrointestinal disorders the compositions of the invention are useful, in part, because they can decrease inflammation by potentiating guanylin activity.

[0012] Without being bound by any particular theory, in the case of IBS and other gastrointestinal disorders the compositions of the invention are also useful because they can decrease gastrointestinal pain or visceral pain by potentiating guanylin activity.

[0013] The invention features pharmaceutical compositions comprising certain compounds that are capable of reducing the activity of chymotrypsin, particularly the ability of chymotrypsin to inactivate guanylin by proteolytic cleavage. Also within the invention are pharmaceutical compositions comprising a chymotrypsin inhibitor as well as combination compositions comprising a chymotrypsin inhibitor and a second therapeutic agent.

[0014] The invention includes methods for treating other disorders such as congestive heart failure and benign prostatic hyperplasia by administering a chymotrypsin inhibitor. Such agents can be used in combination with natriuretic peptides (e.g., atrial natriuretic peptide, brain natriuretic peptide or C-type natriuretic peptide), a diuretic, or an inhibitor of angiotensin converting enzyme.

[0015] The invention features methods and compositions for increasing intestinal motility by potentiating the action of guanylin. Intestinal motility involves spontaneous coordinated distentions and contractions of the stomach, intestines, colon and rectum to move food through the gastrointestinal tract during the digestive process.

[0016] The invention features a therapeutic or prophylactic method comprising administering a composition comprising an inhibitor of chymotrypsin. For the treatment of gastrointestinal disorders, the inhibitor can be administered orally, by rectal suppository or parenterally.

[0017] In various embodiments, the patient is suffering from a gastrointestinal disorder; the patient is suffering from a disorder selected from the group consisting of: a gastrointestinal motility disorder, irritable bowel syndrome, a functional gastrointestinal disorder, gastroesophageal reflux disease, functional heartburn, dyspepsia, functional dyspepsia, nonulcer dyspepsia, gastroparesis, chronic intestinal pseudo-obstruction, colonic pseudo-obstruction, obesity, congestive heart failure, or benign prostatic hyperplasia. In another aspect, the invention features a method for treating a patient suffering from constipation, the method comprising administering a composition comprising, consisting essentially of or consisting of a chymotrypsin inhibitor and a pharmaceutically acceptable carrier. Clinically accepted criteria that define constipation range from the frequency of bowel movements, the consistency of feces and the ease of bowel movement. One common definition of constipation is less than three bowel movements per week. Other definitions include abnormally hard stools or defecation that requires excessive straining (Schiller 2001 Aliment Pharmacol Ther 15:749-763). Constipation may be idiopathic (functional constipation or slow transit constipation) or secondary to other causes including neurologic, metabolic or endocrine disorders. These disorders include diabetes mellitus, hypothyroidism, hyperthyroidism, hypocalcaemia, Multiple sclerosis, Parkinson's disease, spinal cord lesions, Neurofibromatosis, autonomic neuropathy, Chagas disease, Hirschsprung disease and cystic fibrosis. Constipation may also be the result of surgery or due to the use of drugs such as analgesics (like opioids), antihypertensives, anticonvulsants, antidepressants, antispasmodics and antipsychotics.

[0018] In various embodiments, the constipation is associated with use of a therapeutic agent; the constipation is associated with a neuropathic disorder; the constipation is post-surgical constipation (postoperative ileus); the constipation is associated with a gastrointestinal disorder; the constipation is idiopathic (functional constipation or slow transit constipation); the constipation is associated with neuropathic, metabolic or endocrine disorder (e.g., diabetes mellitus, hypothyroidism, hyperthyroidism, hypocalcaemia, Multiple Sclerosis, Parkinson's disease, spinal cord lesions, neurofibromatosis, autonomic neuropathy, Chagas disease, Hirschsprung disease or cystic fibrosis). Constipation may also be the result of surgery or due to the use of drugs such as analgesics (e.g., opioids), antihypertensives, anticonvulsants, antidepressants, antispasmodics and antipsychotics.

[0019] In another aspect, the invention features a method for treating a patient suffering from a gastrointestinal disorder, the method comprising administering a composition comprising, consisting essentially of or consisting of a chymotrypsin inhibitor and a pharmaceutically acceptable carrier.

[0020] In various embodiments, the patient is suffering from a gastrointestinal disorder; the patient is suffering from a disorder selected from the group consisting of: a gastrointestinal motility disorder, irritable bowel syndrome, chronic constipation, post-operative ileus, a functional gastrointestinal disorder, gastroesophageal reflux disease, functional heartburn, dyspepsia, functional dyspepsia, nonulcer dyspepsia, gastroparesis, chronic intestinal pseudo-obstruction, Crohn's disease, ulcerative colitis, Inflammatory bowel disease, colonic pseudo-obstruction, obesity, congestive heart failure, or benign prostatic hyperplasia.

[0021] In another aspect, the invention features a method for increasing gastrointestinal motility in a patient, the method comprising administering to the patient a composition comprising, consisting essentially of or consisting of a chymotrypsin inhibitor and a pharmaceutically acceptable carrier In another aspect, the invention features a method for decreasing gastrointestinal pain or visceral pain in a patient, the method comprising administering to the patient a composition comprising, consisting essentially of or consisting of a chymotrypsin inhibitor and a pharmaceutically acceptable carrier composition comprising a chymotrypsin inhibitor.

[0022] In another aspect, the invention features a method for increasing the activity of an intestinal guanylate cyclase (GC-C) receptor in a patient, the method comprising administering to the patient a composition comprising, consisting essentially of or consisting of a chymotrypsin inhibitor and a pharmaceutically acceptable carrier.

[0023] In another aspect, the invention features a method for increasing the level of cGMP in a patient, the method comprising administering to the patient a composition comprising, consisting essentially of or consisting of a chymotrypsin inhibitor and a pharmaceutically acceptable carrier.

[0024] In another aspect, the invention features a method for treating a disorder ameliorated by increasing cGMP levels, the method comprising, consisting essentially of or consisting of a chymotrypsin inhibitor and a pharmaceutically acceptable carrier.

[0025] In another aspect, the invention features a pharmaceutical composition comprising consisting essentially of or consisting of a chymotrypsin inhibitor and a pharmaceutically acceptable carrier. The composition can include a polymer that controls the release of the inhibitor. The composition can include a second agent, e.g., a GC-C receptor agonist such as guanylin or a biologically active variant or fragment thereof.

[0026] In another aspect, the invention features a method for treating obesity, the method comprising administering a pharmaceutical composition comprising consisting essentially of or consisting of a chymotrypsin inhibitor and a pharmaceutically acceptable carrier. The composition can be administered in combination with another agent for treatment of obesity.

[0027] In another aspect, the invention features a method for treating congestive heart failure, the method comprising: administering to the patient a pharmaceutical composition comprising consisting essentially of or consisting of a chymotrypsin inhibitor and a pharmaceutically acceptable carrier. The composition can be administered in combination with another agent for treatment of congestive heart failure, for example, a natriuretic peptide such as atrial natriuretic peptide, brain natriuretic peptide or C-type natriuretic peptide, a diuretic, or an inhibitor of angiotensin converting enzyme.

[0028] In another aspect, the invention features a method for treating benign prostatic hyperplasia, the method comprising: administering to the patient a pharmaceutical composition comprising consisting essentially of or consisting of a chymotrypsin inhibitor and a pharmaceutically acceptable carrier. The composition can be administered in combination with another agent for treatment of BPH, for example, a 5-alpha reductase inhibitor (e.g., finasteride) or an alpha adrenergic inhibitor (e.g., doxazosine).

[0029] The chymotrypsin inhibitor can be administered in combination with guanylin or a biologically active fragment or variant thereof. A number of guanylin and variants thereof are depicted in FIGS. 3-5. Also useful are guanylin related polypeptides having the formula: In a first aspect, the invention features a polypeptide comprising, consisting of, or consisting essentially of the amino acid sequence: Xaa₁ Xaa₂ Xaa₃ Cys₄ Xaa₅ Xaa₆ Xaa₇ Xaa₈ Xaa₉ Xaa₁₀ Xaa₁₁ Cys₁₂ Xaa₁₃ Xaa₁₄ Xaa₁₅ Xaa₁₆ (SEQ ID NO: 1) wherein:
[0030] Xaa₁ is Ser, Asn, Tyr, Ala, Gln, Pro, Lys, Gly, or Thr, or is missing;
[0031] Xaa₂ is His, Asp, Glu, Ala, Ser, Asn, Gly, or is missing;
[0032] Xaa₃ is Thr, Asp, Ser, Glu, Pro, Val or Leu;
[0033] Xaa₅ is Asp, Ile or Glu;
[0034] Xaa₆ is Ile, Trp or Leu;
[0035] Xaa₇ is Cys, Ser, or Tyr;
[0036] Xaa₈ is Ala, Val, Thr, Ile, Met or is missing;
[0037] Xaa₉ is a) any amino acid, b) Phe, Tyr, Asn, Trp, c) an amino acid other than Phe, Trp, or Tyr, d) non-aromatic amino acid or e) is missing;
[0038] Xaa₁₀ is Ala, Val, Met, Thr or Ile;
[0039] Xaa₁₁ is Ala or Val;
[0040] Xaa₁₃ is Ala or Thr;
[0041] Xaa₁₄ is Gly, Ala or Ser;
[0042] Xaa₁₅ is Cys, Tyr or is missing; and
[0043] Xaa₁₆ is: a) any amino acid; c) is missing or d) His or Leu or Ser.

[0044] The details of one or more embodiments of the invention are set forth in the accompanying description and claims. The publications and patents referenced herein are incorporated by reference.

### FIGURES

[0045] FIG. 1 shows the results of a T84 cGMP assay to assess guanylin activity after a chymotrypsin digestion assay. The chymotrypsin digestion assay was performed in the presence or absence of chymostatin.

[0046] FIG. 2 shows the results of LC/MS analysis of the processing of guanylin in a chymotrypsin digestion assay. The chymotrypsin digestion assay was performed in the presence or absence of chymostatin.

[0047] FIG. 3 depicts the amino acid sequence of various deletion variants of human guanylin in which one, two, three or four amino acids are deleted. The deleted amino acids are between the first and fourth cysteines in human guanylin as well as amino terminal to the first cysteine in human guanylin.

[0048] FIG. 4 depicts the amino acid sequence of various insertion variants of human guanylin in which one, two, three or four amino acids are inserted. The inserted amino acids are between the first and fourth cysteines in human guanylin as well as amino terminal to the first cysteine in human guanylin and carboxy terminal to the fourth cysteine in human guanylin.

[0049] FIG. 5 depict the amino acid sequence of various guanylins and variants thereof.

### DETAILED DESCRIPTION

[0050] Guanylin binds to and activates the guanylate cyclase (GC-C) receptor, a key regulator of fluid and electrolyte balance in the intestine and kidney. When stimulated, this receptor, which is located on the apical membrane of the intestinal epithelial surface, causes an increase in intestinal epithelial cyclic GMP (cGMP). This increase in cGMP is believed to cause a decrease in water and sodium absorption and an increase in chloride and potassium ion secretion, leading to changes in intestinal fluid and electrolyte transport and increased intestinal motility. The intestinal GC-C receptor possesses an extracellular ligand binding region, a transmembrane region, an intracellular protein kinase-like region and a cyclase catalytic domain. Proposed functions for the GC-C receptor are fluid and electrolyte homeostasis, the regulation of epithelial cell proliferation and the induction of apoptosis (Shaibhubhai 2002 Curr Opin Drug Dis Devel 5:261-268).

[0051] In the human body an inactive form of chymotrypsin, chymotrypsinogen is produced in the pancreas. When this inactive enzyme reaches the small intestine it is converted to active chymotrypsin by the excision of two di-peptides. Active chymotrypsin will cleave peptides at the peptide bond on the carboxy-terminal side of Trp, Tyr or Phe and can cleave a peptide at the peptide bond on the amino terminal side of a Leu, Ile or Val (and, at elevated pH, His). Thus, chymotrypsin can cleave guanylin as shown by Greenberg et al. (J Investig Med 45:276-82, 1997). Chymotrypsin-mediated inactivation of guanylin can be prevented by chymostatin, a chymotrypsin inhibitor. Santos-Neto et al 2003 Pharm & Toxicol 92:114 observed that chymostatin was required in order to observe guanylin-induced intestinal fluid secretion in the suckling mouse model.

### Chymotrypsin Inhibitors

[0052] A wide variety of peptide and non-peptide chymotrypsin inhibitors are known. For example:
[0053] 1. tissue-factor-pathway inhibitor (TFPI) (Peterson et al 1996 Eur J Biochem 235:310-6; for examples see human (GENBANK® AAH15514 GI:15930156), mouse (GENBANK® AAH36146 GI:23271605), and dog (GENBANK® AAB32443 GI:833924));
[0054] 2. α-2 antiplasmin (Potempa et al. 1988 Science 241: 699-700, GENBANK® Accession P08697, GI:112907, SEQ ID NO. XXXMALLWGLLVLSWSCLQGPCSVFSPVSAMEPLGRQLTSGPNQEQVSPLTLLKLGN QEPGGQTALKSPPGVCSRDPTPEQTHRLARAMMAFTADLFSLVAQTSTCPNLILS PLSVALALSHLALGAQNHTLQRLQQVLHAGSGPCLPHLLSRLCQDLGPGAFRLA ARMYLQKGFPIKEDFLEQSEQLFGAKPVSLTGKQEDDLANINQWVKEATEGKIQ EFLSGLPEDTVLLLLNAIHFQGFWRNKFDPSLTQRDSFHLDEQFTVPVEMMQART YPLRWFLLEQPEIQVAHFPFKNNMSFVVLVPTHFEWNVSQVLANLSWDTLHPPL VWERPTKVRLPKLYLKHQMDLVATLSQLGLQELFQAPDLRGISEQSLVVSGVQH QSTLELSEVGVEAAAATSIAMSRMSLSSFSVNRPFLFFIFEDTTGLPLFVGSVRNP NPSAPRELKEQQDSPGNKDFLQSLKGFPRGDKLFGPDLKLVPPMEEDYPQFGSPK );
[0055] 3. members of the serpin α-1 antichymotrypsin family (Forsyth et al. 2003 Genomics 81: 336-45; for example see CAS Registry No. 141176-92-3; functional variants thereof are described in European patent application EP1415664 and in Plotnick et al. 2003 Biochemistry 33:29927 (for example the P2 (Leu-357) variant);
[0056] 4. gelin (U.S. Pat. No. 5,397,694, partial sequence (aa 1-29) can be found at GENBANK® Accession AAB27871, GI:409493, SEQ ID NO. XXXVDEKAEVTDGLCGDWTCSGAQVXQNDAAV), which has been proposed as a treatment for dermatitis as well a periodontitis and gingivitis;
[0057] 5. hirustasin (Sollner et al. 1994 Eur J Biochem. 219: 937-43, GENBANK® Accession No P80302, GI:461516, SEQ ID NO. XXXTQGNTCGGETCSAAQVCLKGKCVCNEVHCRIRCKYGLKKD ENGCEYPCSCAKASQ);
[0058] 6. certain eglins including eglin C (GENBANK® Accession P01051, GI:124128, SEQ ID NO. XXXTEFGSELKSFPEVVGKTVDQAREYFTLHYPQYDVYFLPEGSPVTLDLRYNRVRVF YNPGTNVVNHVPHVG) are peptide inhibitors of chymotrypsin. For other examples of eglins, see those disclosed in U.S. Pat. No. 5,180,667, U.S. Pat. No. 6,342,373, U.S. Pat. No. 4,636,489, Seemuller et al. 1981 Methods Enzymol. 804-816, Seemueller et al. 1986 Research Monographs in Cell and Tissue Physiology 337-59, Nick et al 1988 Adv in Experimental Medicine and Biology 240:83-8, and Schnebli et al 1986 Pulm. Emphysema Proteolysis (conference) CAN 107:228147 AN 1987:628147), which has been considered as a treatment for emphysema and for use as a non-steroidal anti-inflammatory agent;
[0059] 7. inhibitors from Bombyx mori (see, e.g., JP 4013698 A2 and JP 04013697 A2; CA registry No. 142628-93-1, SEQ ID NO. XXX DEPTTKPFCEQAFGDCGTPY and CA registry No. 142628-94-2, SEQ ID NO. XXX DKPTTEPFIC EQRFGNCGTG);
[0060] 8. the leech derived peptide thrombin inhibitor, hirudin (Zwilling 1968 Hoppe-Seyler's Zeitschriftfuer Physiologische Chemie 349:1787-8, CA Registry No. 8001-27-2, see for example, Genbank AAA01384 GI:269388, SEQ ID NO. XXXITYTDCTESGQNLCLCEGSNVCGKGNKCILGSQGKDNQCVTGEGTPKPQSHNQG DFEPIPEDAYDE). Hirudin variants are disclosed in the literature (for examples see those in U.S. Pat. No. 5,674,838, Great Britain patent application GB2242681 and those described in Wirsching et al 2003 Molecular Genetics and Metabolism 80:451-462); 9. a shorter hirudin variant, hirulog/BG 8967 (CA Registry No. 128270-60-0, SEQ ID NO. XXX; FPRPGGGGNGDFEEIPEEYL; Angiomax® (bivalirudin)) may also have chymotrypsin inhibition activity and may thus be useful in the present invention along with other peptides disclosed in PCT publication WO04076484 and U.S. Pat. No. 5,196,404; and
[0061] 10. secretory leukocyteprotease inhibitor (SLPI) (for examples see GENBANK® CAA28187 GI:758101 (human), GENBANK® NP_{—}445824.1 GI:16758102 (rat), and GENBANK® NP_{—}035544.1 GI:6755574 (mouse); also Farley et al 1997 Drugs and the Pharmaceutical Sciences 84:305-334.
[0062] 11. α-1 anti-trypsin which can inhibit elastase as well as chymotrypsin and thus may be useful in the present invention (for examples see GENBANK® CAB06092 GI:2780174 (human) and GENBANK® NP_{—}001009663 GI:57527135 (rat)). This product has been sold to treate α-1 anti-trypsin deficiency (a genetic disorder) as . Zemaira™ (Aventis Behring; FDA biologics license 2003 License #1281), Prolastin® (Bayer), and Aralast™ (Baxter).

[0063] In addition, a large number of peptide inhibitors of chymotrypsin are reviewed by Schoofs et al. (2002 Curr Pharm Des. 8: 483-91) and by Salier et al. (1996 Biochem J 315:1-9). McBride et al. 1996 J Mol Biol. 259: 819-27 and McBride et al. 2000 J Pept Sci. 6:446-52 disclose chymotrypsin inhibitors derived from combinatorial peptide libraries including those represented by CAS registry Nos. 306762-66-3, 306762-67-4, 306762-68-5, 306762-69-6, 306762-70-9, 306762-71-0, 306762-72-1, 306762-73-2, 306762-74-3, 306762-75-4, 178330-92-2, 178330-93-3, 178330-94-4, and 178330-95-5.

[0064] In addition, various small molecule inhibitors of chymotrypsin have been described including:
[0065] 1. the compound depicted below and described in EP 0071433 (CAS registry No. 81459-62-3)

[chemical structure]

[0066] Other chymotrypsin inhibitors disclosed in EP 0071433 include those specifically identified as chymotrypsin inhibitors on pages 11-16 of the application and those identified by CA registry Nos. 81459-79-2, 81460-01-7, 85476-59-1, 85476-62-6 (also known as FK-401 CA Index name IH-Indole-3-acetic acid, 5-methoxy-2-methyl-, 4-[[2-[4-[2-(4-morpholinyl)ethyl]-1-piperazinyl]ethoxy]carbonyl]phenyl ester, trihydrochloride), 85476-63-7, 85476-67-1, 85476-70-6, 85858-66-8, 85858-68-0, 85858-69-1, 85858-70-4, 85858-71-5, 85858-72-6, 85858-73-7, 85858-75-9, 85858-77-1, 85858-79-3, 85858-81-7, 85858-83-9, 85858-84-0, 85858-85-1, 85858-87-3, 85858-89-5, 85858-90-8, 85858-92-0, 85879-03-4, 85879-05-6, 85879-06-7, and 85879-08-9);
[0067] 2. compounds with chymotrypsin inhibition activity described in JP 56092217 A2;
[0068] 3. compounds with chymotrypsin inhibition activity described in U.S. Pat. No. 4,755,383 (including, 1-Naphthaleneacetic acid, 4-[[4-(1-methylethyl)-1-piperazinyl]carbonyl]phenyl ester (CA registry No. 90186-24-6), Acetic acid, 9H-fluoren-9-ylidene-, 4-[[4-(1-methylethyl)-1-piperazinyl]carbonyl]phenyl ester (CA registry No. 90185-93-6), 1-Naphthalenecarboxylic acid, 1,2,3,4-tetrahydro-4-[[4-(1-methylethyl)-1-piperazinyl]carbonyl]phenyl ester, monomethanesulfonate (CA registry No. 89703-10-6), 1-Naphthalenecarboxylic acid, 1,2,3,4-tetrahydro-, 4-[(4-cyclohexyl-1-piperazinyl)carbonyl]phenyl ester (CA registry No. 85858-74-8), and 1-isopropyl-4-[4-(1,2,3,4-tetrahydronaphthoyloxy) benzoyl]piperazine methanesulfonate).
[0069] 4. chymotrypsin inhibitors described in U.S. Pat. Nos. 4,755,383 and 4,639,435 include those of Formula I:

[chemical structure]

[0070] wherein A is a single bond, or an alkylene, vinylene, -0-alkylene or methine group; R¹ is a bicyclic carbocyclic residue which may partly be saturated and may optionally be substituted by at least one member of the class consisting of lower alkyl, lower alkoxy, oxo and nitro groups and halogen atoms; a fluorene residue which may optionally have an oxo group; a fluorenylidene group; an anthracene residue; a phenanthrene residue which may partly be saturated and may optionally be substituted by at least one lower alkyl group; a benzofuran or thianaphthene residue which may optionally be substituted by at least one member of the class consisting of lower alkyl and lower alkoxy groups; a benzopyran or benzazine residue which may partly be saturated and may optionally be substituted by at least one member of the class consisting of oxo and phenyl groups; a phthalimide residue; a benzodiazone residue; an isoxazole residue which may optionally be substituted by at least one member of the class consisting of lower alkyl and phenyl groups; an alkylenedioxybenzene residue; or a xanthene residue, and R² is a loweralkyl, cycloalkyl, cycloalkylalkyl or aralkyl group.

[0071] The methods of producing the compounds of the formula (I) and their chymotrypsin inhibitory activity characteristics have been described in Japanese Patent Application No. 109192/1982 and in Japanese Patent Application filed Apr. 28, 1983.
[0072] 5. inhibitors described in EP 0128007 and U.S. Pat. No. 4,620,005 including: 1-isopropyl-4-[(4-(1,2,3,4-tetrahydro-1-naphthoyloxy)phenyl)carbonyloxymethyl carbonyl]piperazine; 1-isopropyl-4-[(4-(1,2,3,4-tetrahydro-1-naphthoyloxy)phenyl)ethyl carbonyl]piperazine; and and 1-isopropyl-4-[(4-(1,2,3,4-tetrahydro-1-naphthoyloxy)phenyl)methylcarbonyl ]piperazine;
[0073] 6. inhibitors described U.S. Pat. No. 4,898,876 including inhibitors: 1-isopropyl-4-(4-(5,6,7,8-tetraphydronaphthalene-1-acetyloxy)benzoyl)piperazinehydrochloride; 1-isopropyl-4-(4-(9-fluorenylidene acetyloxy)benzoyl)piperazine; 1-isopropyl-4-(4-(thianaphthene-2-acetyloxy)benzoyl)piperazine methanesulfonate; 1-methyl-4-(4-(7-methoxyl-1,2,3,4-tetrahydro-1-naphtoyloxy) benxoyl)piperazine;methanesulfonate; and 1-methyl-4-(3-(1,2,3,4-tetrahydro-1-naphthoyloxy)benzoyl)piperazine hydrochloride);
[0074] 7. YS3025 (CAS Registry No. 138320-33-9) disclosed by Rizzi et al. (1992 Biochem Int. 28:385-92);

[chemical structure]

[0075] 8. MR889 (CA registry No. 94149-41-4) disclosed by Luisetti et al. (1989 Biochem Biophys Res Commun. 165:568-73);

[chemical structure]

[0076] 9. chymotrypsin inhibitors disclosed by Yokoo et al. (1987 Yakugaku Zasshi 107:732-7), many of which are of the phenyl ester type and which include those represented by CAS Registry Nos. 85858-76-0, 89703-10-6 (also known as FK-448 CA index name 1-Naphthalenecarboxylic acid, 1,2,3,4-tetrahydro-, 4-[[4-(1-methylethyl)-1-piperazinyl]carbonyl]phenyl ester, monomethanesulfonate), 90185-92-5, 90185-96-9, 90185-98-1, 90186-00-8, 90186-01-9, 90186-05-3, 90186-06-4, 90186-07-5, 90186-08-6, 90186-09-7, 90186-10-0, 90186-11-1, 90186-12-2, 90186-13-3, 90186-14-4, 90186-22-4, 90186-23-5, 90186-24-6, 90186-25-7, 90186-27-9, 90186-28-0, 90186-29-1, 90186-31-5, 90186-35-9, 90186-43-9, 90209-88-4, 90209-89-5, 90209-92-0, 90209-94-2, 90209-96-4, 90209-97-5, 90210-01-8, 90210-03-0, 90210-04-1, 90210-25-6, 90210-26-7, 90210-28-9, 90230-84-5, 90409-84-0, 95460-86-9, 95460-87-0, 95460-88-1, 95460-89-2, 95460-91-6, 114949-00-7, 114949-01-8, 114949-02-9, 114949-03-0, 114949-04-1, 114949-05-2, 114949-06-3, 114949-18-7, 114949-19-8, 114964-69-1, and 114964-70-4; and
[0077] 10. the two chymotrypsin inhibitors shown below described by Boulanger (1986 Journal of Medicinal Chemistry 29:1483-7);

[chemical structure]

[0078] A number of chymotrypsin inhibitors are available from commercial suppliers, including:
[0079] 1. chymostatin (CAS registry No. 9076-44-2);

[chemical structure]

[0080] 2. the inhibitor aprotinin or a derivative thereof (TRASYLOL®); CAS Registry No. 9087-70-1; SEQ ID NO. XXX; MKMSRLCLSVALLVLLGTLAASTPGCDTSNQAKAQRPDFCLEPPYTGPCKARIIR YFYNAKAGLCQTFVYGGCRAKRNNFKSAEDCMRTCGGAIGPWENL);
[0081] 3. 4-(2-aminoethyl)-benzenesulfonylfluoride hydrochloride (Pefabloc; CAS Registry No. 30827-99-7);

[chemical structure]

[0082] 4. benzamidine (CA Registry No. 618-39-3);

[chemical structure]

[0083] 5. di-isopropyl phosphofluoridate (CAS Registry No. 55-91-4);

[chemical structure]

[0084] 6. 6-aminocaproic acid (CAS Registry No. 60-32-2);

[chemical structure]

[0085] 7. CAS Registry No. 88070-98-8;

[chemical structure]

[0086] 8. ecotin (a peptide inhibitor, CAS Registry No. 87928-05-0; ecotin variants with enhanced activity are described in PCT Publication Nos. WO0061634 and WO0061782);
[0087] 9. PMSF;

[chemical structure]

and
[0088] 10. benzenesulfonamide (also known as N-tosyl-L-phenylalaninechloromethyl ketone (TPCK); CAS Registry No. 402-71-1).

[chemical structure]

[0089] A number of chymotrypsin inhibitors are produced by plants, including: the peptide inhibitor CI2 (CA Registry No. 139466-47-0, GENBANK® Accession S18818, GI:100574), and variants and homologs thereof including CI-2A (U.S. Pat. No. 5,167,483), CI-2A (WO 9205239), WCI-3 (Shibata et al. 1988 J Biochem (Tokyo) 104:537-43), WCI-2 (Habu et al. 1992 J Biochem (Tokyo) 111:249-58), and WCI-x (Habu et al., supra). Other plant-derived inhibitors have also been described (Bryant et al. 1976 Biochemistry 15:3418-24; Hass et al. 1982 Biochemistry 21:752-6; Birk 1985 Int J Pept Protein Res. 25:113-31; Pearce et al 1982 Archives of Biochemistry and Biophysics 213:456-62; Tamir et al 1996 Journal ofProtein Chemistry 15: 219-29; Birk et al 1999 Khimiya beYisra'el 1:9-12; Polya 2003 Studies in Natural Products Chemistry 29: 567-641; Weder et al 2004 Journal of Agricultural and Food Chemistry 52:4219-4226; Teles et al 2004 Phytochemistry 65: 793-799; Tsoi et al 2004 Biological Chemistry 385:185-189 and Kollipara et al. 1992 Journal of Agricultural and Food Chemistry 40:2356-63). Hammond et al 1984 J. Biol. Chem. 259: 9883-9890 describe the Bowman-Birk protease inhibitor (BBI) in soybean (for example see GENBANK® AA089509 GI:29691202). BBIs are reviewed in Bowman et al. 1993 Protease Inhib. Cancer Chemoprev. Agents 93-6. Synthetic peptides have been generated which mimic BBI inhibitors (McBride et al 2001 Current Medicinal Chemistry 8: 909-917 and McBride et al 2002 Biopolymers 66:79-92). Other chymotrypsin inhibitors are described in Bister et al 2004 Journal of Natural Products 67: 1755-1757; Szenthe et al 2004 Biochemistry 43:3376-3384; Zhou et al. 2004 Comparative Biochemistry and Physiology, Part B: Biochemistry & Molecular Biology 137B:219-224 and Mak et al. 2004 Biochimica et Biophysica Acta 1671:93-105. These chymotrypsin inhibitors and others are useful in the methods of the invention.

### Chymotrypsin Activity Assays

[0090] Any standard chymotrypsin activity assay can be used to assess known chymotrypsin inhibitors and compounds which may inhibit chymotrypsin.

[0091] For example chymotrypsin activity can be measured using N-Glutaryl-Lphenylalanine p-nitroanilide (Sigma-Aldrich, Inc; Catalog No. 49738) as a substrate and cc-Chymotrypsin from bovine pancreas (EC 3 2 1. 1; Sigma-Aldrich; Catalog No. C4129) in an assay described by Kakade et al. (Cereal Chemistry 51:376 (1974)). In this assay, chymotrypsin hydrolyzes the substrate N-Glutaryl-L-phenylalanine-p-nitroanilide present in excess. The release of p-nitroanilide, a yellow dye, is measured spectrophotometrically.

[0092] An additional chymotrypsin assay is described by Kourteva et al. (Analytical Biochemistry 162:345-9, 1987) This assay is rapid and particularly useful for assessing higher molecular weight inhibitors. Briefly, a test compound is spotted onto an agar film which contains TLCK-chymotrypsin. Enzyme inhibition is visualized as colorless zones on a pink background after the films are stained with a chromogenic substrate N-acetyl-DL-phenylalanine-β-naphthyl ester. A variation on this assay can be use to assess trypsin activity and this can be useful for assessing the selectivity of an inhibitor.

### Guanylin Degradation Assay

[0093] Since guanylin is susceptible to digestion by chymotrypsin, chymotrypsin activity can be assayed based on guanylin cleavage. Guanylin (Sigma, G-116) or a guanylin variant were resuspended in 5 ml of 100 mM Tris-HCl, 2 mM CaCl₂, pH 7.8 at 30° C. for a final concentration of 0.01 mg/ml. From this stock, six (6) 500 μl aliquots were prepared in 2 ml Eppendorf tubes and labeled “Control”, “T0”, “T15”, “T30”, “T60”, and “T180”, with “T_” representing timepoints, in minutes. 5 μl of a 10 mM chymostatin (Sigma, C7268) stock (5 mg of chymostatin resuspended in 824 μl of DMSO) was added to the “Control” samples and all samples were incubated for 5 minutes at 30° C. Chymostatin inhibits chymotrypsin activity and this sample served as a negative control. Next, 20 μl of a chymotrypsin (Sigma, C6423) enzyme solution (0.01 mg/ml bovine chymotrypsin enzyme in 1 mM HCl, 2 mM Calcium Chloride) were added to the samples and mixed by inversion. Samples are incubated at 30° C. The “T0” samples were collected at time=0 minutes by adding 5 μl of a 10 mM chymostatin stock and subsequently stored at −80° C. All other timepoint samples are taken in a similar manner, with the “Control” samples collected parallel to the time=180 minutes samples. Determination of sensitivity to digestion by chymotrypsin was determined by LCMS analysis and by in vitro activity in the T84 cGMP assays described below.

[0094] For LC/MS analysis, samples were injected (10 μL) onto a reverse phase HPLC column (Waters Atlantis dC₁₈1.0×150 mm, 3 um particle size, 186001283) at 20° C., and were eluted with a reverse phase gradient (Mobile Phase A: 5 mM NH₄OAc in dH₂O, 0.1% formic acid, Mobile Phase B: 5 mM NH₄OAc in 80% methanol and 20% dH₂O, 0.1% formic acid; Initial condition of 5% B, ramping to 95% B over 35 minutes, and holding for 3 minutes, then returning to initial conditions over the next 7 minutes, all at a flow rate of 0.07 mL/min.). At 45 minutes, the gradient was at initial conditions of 5%B and held for 15 minutes. Guanylin samples were detected by quadrapole-time of flight mass spectrometry in TOF scan mode (cone voltage=30 V; collision=4 eV). Chymotrypsin sensitivity was determined by the loss of the initial mass species and the formation of the product mass species, with respect to time. Instrument response was converted into percentage units by comparison of the response of the initial mass versus the product mass, with “T0” representing total response of initial mass for all samples.

### Guanylins and Guanylin Variants

[0095] When it is desirable to potentiate the activity of guanylin by the administration of a chymotrypsin inhibitor it may also be desirable to administer guanylin or a biologically active variant or fragment thereof. A human guanylin is depicted in FIG. 5 along with various other guanylins. A number of guanylin variants are depicted in FIGS. 3 and 4.

### Activation of the Intestinal GC-C Receptor by Guanylin (T84 cGMP Assay)

[0096] The ability of guanylin to activate the intestinal GC-C receptor was assessed in an assay employing the T84 human colon carcinoma cell line (American Type Culture Collection (Bethesda, Md.). For the assays cells were grown to confluency in 24-well culture plates with a 1:1 mixture of Ham's F12 medium and Dulbecco's modified Eagle's medium (DMEM), supplemented with 5% fetal calf serum and were used at between passages 54 and 60.

[0097] Briefly, monolayers of T84 cells in 24-well plates were washed twice with 1 ml/well DMEM, then incubated at 37° C. for 10 min with 0.45 ml DMEM containing 1 mM isobutylmethylxanthine (IBMX), a cyclic nucleotide phosphodiesterase inhibitor. Test peptides (50 μl) were then added and incubated for 30 minutes at 37° C. The media was aspirated and the reaction was then terminated by the addition of ice cold 0.5 ml of 0.1N HCl. The samples were held on ice for 20 minutes and then evaporated to dryness using a heat gun or vacuum centrifugation. The dried samples were resuspended in 0.5 ml of phosphate buffer provided in the Cayman Chemical Cyclic GMP EIA kit (Cayman Chemical, Ann Arbor, Mich.). Cyclic GMP was measured by EIA according to procedures outlined in the Cayman Chemical Cyclic GMP EIA kit. FIG. 1 shows that guanylin stimulated cGMP activity decreases over time in the presence of chymotrypsin. This activity was retained when the chymotrypsin inhibitor, chymostatin was present. FIG. 2 shows the results of LC/MS analysis of the processing of guanylin by chymotrypsin in the guanylin degradation assay.

### Intestinal GC-C Recetor Binding Assay

[0098] The ability of peptides and other agents to bind to the intestinal GC-C receptor can be tested as follows. Cells of the T84 human colon carcinoma cell line (American Type Culture Collection (Bethesda, Md.) are grown to confluence in 24-well culture plates with a 1:1 mixture of Ham's F12 medium and Dulbecco's modified Eagle's medium (DMEM), supplemented with 5% fetal calf serum. Cells used in the assay are typically between passages 54-60. Briefly, T84 cell monolayers in 24-well plates are washed twice with 1 ml of binding buffer (DMEM containing 0.05% bovine serum albumin and 25 mM HEPES, pH 7.2), then incubated for 30 min at 37° C. in the presence of mature radioactively labeled E. coli ST peptide and the test material at various concentrations. The cells are then washed four times with 1 ml of DMEM and solubilized with 0.5 ml/well IN NaOH. The level of radioactivity in the solubilized material is then determined using standard methods. In some cases, intestinal epithelial cell preparations may be used instead of T84 cells to assess receptor binding.

### Murine Gastrointestinal Transit (GIT) Assay

[0099] In order to determine if an agent of the invention has an effect on intestinal motility, the inhibitor can be tested in the murine gastrointestinal transit (GIT) assay (Moon et al. Infection and Immunity 25:127, 1979). This assay can also be used to determine the effect of an agent of the invention on intestinal motility. In this assay, charcoal, which can be readily visualized in the gastrointestinal tract is administered to mice after the administration of a test compound. The distance traveled by the charcoal is measured and expressed as a percentage of the total length of the colon.

[0100] Mice are fasted with free access to water for 12 to 16 hours before the treatment with peptide or control buffer. A test agent is orally administered in buffer (20 mM Tris pH 7.5) seven minutes before being given an oral dose of 5% Activated Carbon (Aldrich 242276-250G). Control mice are administered buffer only before being given a dose of Activated Carbon. After 15 minutes, the mice are sacrificed and their intestines from the stomach to the cecum are dissected. The total length of the intestine as well as the distance traveled from the stomach to the charcoal front is measured for each animal and the results are expressed as the percent of the total length of the intestine traveled by the charcoal front. Results are reported as the average of 10 mice±standard deviation. A comparison of the distance traveled by the charcoal between the mice treated with the agent versus the mice treated with vehicle alone is performed using a Student's t test and a statistically significant difference is considered for P<0.05. Positive controls for this assay may include Zelnorm®, a drug approved for IBS that is an agonist for the serotonin receptor 5HT4.

### Suckling Mouse Model of Intestinal Secretion (SuMi Assay)

[0101] Chymotrypsin inhibitors and other agents can be tested for their ability to increase intestinal secretion using a suckling mouse model of intestinal secretion. In this model a test compound is administered to suckling mice that are between seven and nine days old. After the mice are sacrificed, the gastrointestinal tract from the stomach to the cecum is dissected (“guts”). The remains (“carcass”) as well as the guts are weighed and the ratio of guts to carcass weight is calculated. If the ratio is above 0.09, one can conclude that the test compound increases intestinal secretion. Controls for this assay may include Zelnorm®

### Phenylbenzoquinone-Induced Writhing Model

[0102] The PBQ-induced writhing model can be used to assess whether administration of a compound such as a chymotrypsin inhibitor or a chymotrypsin inhibitor administered with guanylin or a biologically active variant or fragment thereofanalogue reduces pain. This model is described by Siegmund et al. (1957 Proc. Soc. Exp. Bio. Med. 95:729-731). Briefly, one hour after oral dosing with a test compound, morphine or vehicle, 0.02% phenylbenzoquinone (PBQ) solution (12.5 mL/kg) is injected by intraperitoneal route into the mouse. The number of stretches and writhings are recorded from the 5^{th} to the 10^{th} minute after PBQ injection, and can also be counted between the 35^{th} and 40^{th} minute and between the 60^{th} and 65^{th} minute to provide a kinetic assessment. The results are expressed as the number of stretches and writhings (mean±SEM) and the percentage of variation of the nociceptive threshold calculated from the mean value of the vehicle-treated group. The statistical significance of any differences between the treated groups and the control group is determined by a Dunnett's test using the residual variance after a one-way analysis of variance (P<0.05) using SigmaStat Software.

### Colonic Hyperalgesia Animal Models

[0103] Hypersensitivity to colorectal distension is a common feature in patients with IBS and may be responsible for the major symptom of pain. Both inflammatory and non-inflammatory animal models of visceral hyperalgesia to distension have been developed to investigate the effect of compounds on visceral pain in IBS and can be used to assess the impact of a compound such as a chymotrypsin inhibitor or a chymotrypsin inhibitor administered with guanylin or biologically active variant or fragment thereof.

### I. Trinitrobenzenesulphonic acid (TNBS)-Induced Rectal Allodynia Model

[0104] Male Wistar rats (220-250 g) are premedicated with 0.5 mg/kg of acepromazine injected intraperitoneally (IP) and anesthetized by intramuscular administration of 100 mg/kg of ketamine. Pairs of nichrome wire electrodes (60 cm in length and 80 μm in diameter) are implanted in the striated muscle of the abdomen, 2 cm laterally from the white line. The free ends of electrodes are exteriorized on the back of the neck and protected by a plastic tube attached to the skin. Electromyographic (EMG) recordings are started 5 days after surgery. Electrical activity of abdominal striated muscle is recorded with an electroencephalograph machine (Mini VIII, Alvar, Paris, France) using a short time constant (0.03 sec.) to remove low-frequency signals (<3 Hz).

[0105] Ten days post surgical implantation, trinitrobenzenesulphonic acid (TNBS) is administered to induce rectal inflammation. TNBS (80 mg kg⁻¹ in 0.3 ml 50% ethanol) is administered intrarectally through a silicone rubber catheter introduced at 3 cm from the anus under light diethyl-ether anesthesia, as described (Morteau et al. 1994 Dig Dis Sci 39:1239). Following TNBS administration, rats are placed in plastic tunnels where they are severely limited in mobility for several days before colorectal distension (CRD). Experimental compound is administered one hour before CRDwhich is performed by insertion into the rectum, at 1 cm of the anus, a 4 cm long balloon made from a latex condom (Gue et al, 1997 Neurogastroenterol. Motil. 9:271). The balloon is fixed on a rigid catheter taken from an embolectomy probe (Fogarty). The catheter attached balloon is fixed at the base of the tail. The balloon, connected to a barostat is inflated progressively by step of 15 mmHg, from 0 to 60 mmHg, each step of inflation lasting 5 min. Evaluation of rectal sensitivity, as measured by EMG, is performed before (1-2 days) and 3 days following rectal instillation of TNBS.

[0106] The number of spike bursts that corresponds to abdominal contractions is determined per 5 min periods. Statistical analysis of the number of abdominal contractions and evaluation of the dose-effects relationships is performed by a one way analysis of variance (ANOVA) followed by a post-hoc (Student or Dunnett tests) and regression analysis for ED50 if appropriate.

### II. Stress-Induced Hyperalgesia Model

[0107] Male Wistar Rats (200-250 g) are surgically implanted with nichrome wire electrodes as in the TNBS model. Ten days post surgical implantation, partial restraint stress (PRS), is performed as described by Williams et al. for two hours (Williams et al. 1988 Gastroenterology 64:611). Briefly, under light anaesthesia with ethyl-ether, the foreshoulders, upper forelimbs and thoracic trunk are wrapped in a confining harness of paper tape to restrict, but not prevent body movements. Control sham-stress animals are anaesthetized but not wrapped. Thirty minutes before the end of the PRS session, the animals are administered test-compound or vehicle. Thirty minutes to one hour after PRS completion, the CRD distension procedure is performed as described above for the TNBS model with barostat at pressures of 15, 30, 45 and 60 mm Hg. Statistical analysis on the number of bursts is determined and analyzed as in the TNBS model above.

### Administration of Chymotrypsin Inhibitors

[0108] For treatment of gastrointestinal disorders, chymotrypsin inhibitors can be administered orally, e.g., as a tablet or cachet containing a predetermined amount of the active ingredient, pellet, gel, paste, syrup, bolus, electuary, slurry, capsule; “flash dosage”; powder; granules; as a solution or a suspension in an aqueous liquid or a non-aqueous liquid; as an oil-in-water liquid emulsion or a water-in-oil liquid emulsion, via a liposomal formulation (see, e.g., EP 736299) or in some other form. Orally administered compositions can include binders, lubricants, inert diluents, lubricating, surface active or dispersing agents, flavoring agents, and humectants. Orally administered formulations such as tablets may optionally be coated or scored and may be formulated so as to provide sustained, delayed or controlled release of the active ingredient therein. The chymotrypsin inhibitors can also be administered rectally, e.g., by suppository.

[0109] The chymotrypsin inhibitors can be co-administered with other agents used to treat gastrointestinal disorders including but not limited to those described herein. The chymotrypsin inhibitor can be administered together with guanylin or a guanylin variant or analogue. The inhibitors can also be administered by rectal suppository. For the treatment of disorders outside the gastrointestinal tract such as congestive heart failure and benign prostatic hypertrophy, inhibitors are preferably administered parenterally or orally. Chymotrypsin inhibitors preferably reach the small and/or large intestine in order to effectively reduce the activity of chymotrypsin that proteolytically digests guanylin. If the inhibitor(s) is to be administered orally, it is preferably formulated with an enteric coating. For example, the formulation can be provided with a non-porous, gastric acid-resistant polymer coating, e.g., a coating that is insoluble or only slightly soluble at pH 1.5 to pH 5, but is soluble above pH 5 or pH 5.5 up to or above pH 9. The polymer can include, for example, hydroxypropyl methyl cellulose phthalate, cellulose acetate phthalate, diethyl phthalate, dibutyl phthalate, and acrylic based polymers. The formulation can also be buffered by inclusion of a buffering agent, for example, sodium bicarbonate, potassium carbonate, potassium bicarbonate, ammonium carbonate, tromethamine, di(tris)hydroxymethylaminomethane) carbonate, tris-glycine, di-arginine, tri-arginine, poly-arginine, di-lysine, tri-lysine, poly-lysine, diethylamine and triethanolamine. It can be desirable for the buffering agent to provide a pH of from about 7 to about 9 in the small intestine or large intestine of a human patient. The formulation can also include a disintegrant, e.g., ursodiol, starch, modified starches, microcrystalline cellulose and propylene glycol alginate.

[0110] The chymotrypsin inhibitors described herein can be used alone or in combination with other agents. For example, they can be administered together with an agent for treating a gastrointestinal disorder. The chymotrypsin inhibitors can be administered in a combination therapy with guanylin or a biologically active variant or fragment thereof.

[0111] Combination therapy can be achieved by administering two or more agents, e.g., a chymotrypsin inhibitor and an agent for treating a gastrointestinal disorder or an analgesic peptide or compound, each of which is formulated and administered separately, or by administering two or more agents in a single formulation. Other combinations are also encompassed by combination therapy. For example, two agents can be formulated together and administered in conjunction with a separate formulation containing a third agent. While the two or more agents in the combination therapy can be administered simultaneously, they need not be. For example, administration of a first agent (or combination of agents) can precede administration of a second agent (or combination of agents) by minutes, hours, days, or weeks. Thus, the two or more agents can be administered within minutes of each other or within 1, 2, 3, 6, 9, 12, 15, 18, or 24 hours of each other or within 1, 2, 3, 4, 5, 6, 7, 8, 9, 10, 12, 14 days of each other or within 2, 3, 4, 5, 6, 7, 8, 9, or 10 weeks of each other. In some cases even longer intervals are possible. While in many cases it is desirable that the two or more agents used in a combination therapy be present in within the patient's body at the same time, this need not be so.

[0112] Combination therapy can also include two or more administrations of one or more of the agents used in the combination. For example, if agent X and agent Y are used in a combination, one could administer them sequentially in any combination one or more times, e.g., in the order X-Y-X, X-X-Y, Y-X-Y, Y-Y-X, X-X-Y-Y, etc.

[0113] The agents, alone or in combination, can be combined with any pharmaceutically acceptable carrier or medium. Thus, they can be combined with materials that do not produce an adverse, allergic or otherwise unwanted reaction when administered to a patient. The carriers or mediums used can include solvents, dispersants, coatings, absorption promoting agents, controlled release agents, and one or more inert excipients (which include starches, polyols, granulating agents, microcrystalline cellulose, diluents, lubricants, binders, disintegrating agents, and the like), etc. If desired, tablet dosages of the disclosed compositions may be coated by standard aqueous or nonaqueous techniques.

[0114] Compositions of the present invention may also optionally include other therapeutic ingredients, anti-caking agents, preservatives, sweetening agents, colorants, flavors, desiccants, plasticizers, dyes, and the like. Any such optional ingredient must be compatible with the compound of the invention to insure the stability of the formulation. The composition may contain other additives as needed, including for exanple lactose, glucose, fructose, galactose, trehalose, sucrose, maltose, raffinose, maltitol, melezitose, stachyose, lactitol, palatinite, starch, xylitol, mannitol, myoinositol, and the like, and hydrates thereof, and amino acids, for example alanine, glycine and betaine, and peptides and proteins, for example albumen.

[0115] Examples of excipients for use as the pharmaceutically acceptable carriers and the pharmaceutically acceptable inert carriers and the aforementioned additional ingredients include, but are not limited to binders, fillers, disintegrants, lubricants, anti-microbial agents, and coating agents such as:

[0116] BINDERS: corn starch, potato starch, other starches, gelatin, natural and synthetic gums such as acacia, sodium alginate, alginic acid, other alginates, powdered tragacanth, guar gum, cellulose and its derivatives (e.g., ethyl cellulose, cellulose acetate, carboxymethyl cellulose calcium, sodium carboxymethyl cellulose), polyvinyl pyrrolidone, methyl cellulose, pre-gelatinized starch (e.g., STARCH 1500® and STARCH 1500 LM®, sold by Colorcon, Ltd.), hydroxypropyl methyl cellulose, microcrystalline cellulose (e.g. AVICEL™, such as, AVICEL-PH-101™, −103™ and −105™, sold by FMC Corporation, Marcus Hook, Pa., USA), or mixtures thereof,

[0117] FILLERS: talc, calcium carbonate (e.g., granules or powder), dibasic calcium phosphate, tribasic calcium phosphate, calcium sulfate (e.g., granules or powder), microcrystalline cellulose, powdered cellulose, dextrates, kaolin, mannitol, silicic acid, sorbitol, starch, pre-gelatinized starch, or mixtures thereof,

[0118] DISINTEGRANTS: agar-agar, alginic acid, calcium carbonate, microcrystalline cellulose, croscarmellose sodium, crospovidone, polacrilin potassium, sodium starch glycolate, potato or tapioca starch, other starches, pre-gelatinized starch, clays, other algins, other celluloses, gums, or mixtures thereof,

[0119] LUBRICANTS: calcium stearate, magnesium stearate, mineral oil, light mineral oil, glycerin, sorbitol, mannitol, polyethylene glycol, other glycols, stearic acid, sodium lauryl sulfate, talc, hydrogenated vegetable oil (e.g., peanut oil, cottonseed oil, sunflower oil, sesame oil, olive oil, corn oil and soybean oil), zinc stearate, ethyl oleate, ethyl laurate, agar, syloid silica gel (AEROSIL 200, W.R. Grace Co., Baltimore, Md. USA), a coagulated aerosol of synthetic silica (Deaussa Co., Plano, Tex. USA), a pyrogenic silicon dioxide (CAB-O-SIL, Cabot Co., Boston, Mass. USA), or mixtures thereof,

[0120] ANTI-CAKING AGENTS: calcium silicate, magnesium silicate, silicon dioxide, colloidal silicon dioxide, talc, or mixtures thereof,

[0121] ANTIMICROBIAL AGENTS: benzalkonium chloride, benzethonium chloride, benzoic acid, benzyl alcohol, butyl paraben, cetylpyridinium chloride, cresol, chlorobutanol, dehydroacetic acid, ethylparaben, methylparaben, phenol, phenylethyl alcohol, phenoxyethanol, phenylmercuric acetate, phenylmercuric nitrate, potassium sorbate, propylparaben, sodium benzoate, sodium dehydroacetate, sodium propionate, sorbic acid, thimersol, thymo, or mixtures thereof, and

[0122] COATING AGENTS: sodium carboxymethyl cellulose, cellulose acetate phthalate, ethylcellulose, gelatin, pharmaceutical glaze, hydroxypropyl cellulose, hydroxypropyl methylcellulose, hydroxypropyl methyl cellulose phthalate, methylcellulose, polyethylene glycol, polyvinyl acetate phthalate, shellac, sucrose, titanium dioxide, camauba wax, microcrystalline wax, or mixtures thereof.

[0123] The agents either in their free form or as a salt can be combined with a polymer such as polylactic-glycoloic acid (PLGA), poly-(I)-lactic-glycolic-tartaric acid (P(I)LGT) (WO 01/12233), polyglycolic acid (U.S. Pat. No. 3,773,919), polylactic acid (U.S. Pat. No. 4,767,628), poly(M-caprolactone) and poly(alkylene oxide) (U.S. 20030068384) to create a sustained release formulation. Such formulations can be used to implants that release a peptide or another agent over a period of a few days, a few weeks or several months depending on the polymer, the particle size of the polymer, and the size of the implant (see, e.g., U.S. Pat. No. 6,620,422). Other sustained release formulations and polymers for use in are described in EP 0 467 389 A2, WO 93/24150, U.S. Pat. No. 5,612,052, WO 97/40085, WO 03/075887, WO 01/01964A2, U.S. Pat. No. 5,922,356, WO 94/155587, WO 02/074247A2, WO 98/25642, U.S. Pat. No. 5,968,895, U.S. Pat. No. 6,180,608, U.S. 20030171296, U.S. 20020176841, U.S. Pat. No. 5,672,659, U.S. Pat. No. 5,893,985, U.S. Pat. No. 5,134,122, U.S. Pat. No. 5,192,741, U.S. Pat. No. 5,192,741, U.S. Pat. No. 4,668,506, U.S. Pat. No. 4,713,244, U.S. Pat. No. 5,445,832 U.S. Pat. No. 4,931,279, U.S. Pat. No. 5,980,945, WO 02/058672, WO 9726015, WO 97/04744, and US20020019446. In such sustained release formulations microparticles of peptide are combined with microparticles of polymer. One or more sustained release implants can be placed in the large intestine, the small intestine or both. U.S. Pat. No. 6,011,011 and WO 94/06452 describe a sustained release formulation providing either polyethylene glycols (i.e. PEG 300 and PEG 400) or triacetin. WO 03/053401 describes a formulation which may both enhance bioavailability and provide controlled releaseof the agent within the GI tract. Additional controlled release formulations are described in WO 02/38129, EP 326 151, U.S. Pat. No. 5,236,704, WO 02/30398, WO 98/13029; U.S. 20030064105, U.S. 20030138488A1, U.S. 20030216307A1, U.S. Pat. No. 6,667,060, WO 01/49249, WO 01/49311, WO 01/49249, WO 01/49311, and U.S. Pat. No. 5,877,224.

[0124] The agents can be administered, e.g., by intravenous injection, intramuscular injection, subcutaneous injection, intraperitoneal injection, topical, sublingual, intraarticular (in the joints), intradermal, buccal, ophthalmic (including intraocular), intranasaly (including using a cannula), via intracavemosal injection, by transurethral application or by other routes.

[0125] The agents can be administered orally, e.g., as a tablet or cachet containing a predetermined amount of the active ingredient, gel, pellet, paste, syrup, bolus, electuary, slurry, capsule, powder, granules, as a solution or a suspension in an aqueous liquid or a non-aqueous liquid, as an oil-in-water liquid emulsion or a water-in-oil liquid emulsion, via a micellar formulation (see, e.g. WO 97/11682) via a liposomal formulation (see, e.g., EP 736299, WO 99/59550 and WO 97/13500), via formulations described in WO 03/094886 or in some other form. Orally administered compositions can include binders, lubricants, inert diluents, lubricating, surface active or dispersing agents, flavoring agents, and humectants. Orally administered formulations such as tablets may optionally be coated or scored and may be formulated so as to provide sustained, delayed or controlled release of the active ingredient therein. The agents can also be administered transdermally (i.e. via reservoir-type or matrix-type patches, microneedles, thermal poration, hypodermic needles, iontophoresis, electroporation, ultrasound or other forms of sonophoresis, jet injection, or a combination of any of the preceding methods (Prausnitz et al. 2004, Nature Reviews Drug Discovery 3:115-124)). The agents can be administered using high-velocity transdermal particle injection techniques using the hydrogel particle formulation described in U.S. 20020061336. Additional particle formulations are described in WO 00/45792, WO 00/53160, and WO 02/19989. An example of a transdermal formulation containing plaster and the absorption promoter dimethylisosorbide can be found in WO 89/04179. WO 96/11705 provides formulations suitable for transdermal adminisitration. The agents can be administered in the form a suppository or by other vaginal or rectal means. The agents can be administered in a transmembrane formulation as described in WO 90/07923. The agents can be administed non-invasively via the dehydrated particicles described in U.S. Pat. No. 6,485,706. The agent can be administered in an enteric-coated drug formulation as described in WO 02/49621. The agents can be administered intranassaly using the formulation described in U.S. Pat. No. 5,179,079. Formulations suitable for parenteral injection are described in WO 00/62759. The agents can be administered using the casein formulation described in U.S. 20030206939 and WO 00/06108. The agents can be administered using the particulate formulations described in U.S. 20020034536.

[0126] Compositions for oral administration can be in the form a of a “flash dosage”, i.e., a solid dosage form that is administered orally, which rapidly disperses in the mouth, and hence does not require great effort in swallowing and allows the compound to be rapidly ingested or absorbed through the oral mucosal membranes. In some embodiments, suitable rapidly dispersing dosage forms are also used in other applications, including the treatment of wounds and other bodily insults and diseased states in which release of the medicament by externally supplied moisture is not possible.

[0127] “Flash dose” forms are known in the art; see for example, effervescent dosage forms and quick release coatings of insoluble microparticles in U.S. Pat. Nos. 5,578,322 and 4,607,697; freeze dried foams and liquids in U.S. Pat. Nos. 4,642,903 and 5,631,023; melt spinning of dosage forms in U.S. Pat. Nos. 4,855,326; 5,380,326; and 5,518,730; solid, freeform fabrication in U.S. Pat. No. 6,471,992; saccharide-based carrier matrix and a liquid binder in U.S. Pat. Nos. 5,587,172; 5,616,344; 6,277,406; and 5,622,719; and other forms known to the art.

[0128] The agents, alone or in combination with other suitable components, can be administered by pulmonary route utilizing several techniques including but not limited to intratracheal instillation (delivery of solution into the lungs by syringe), intratracheal delivery of liposomes, insufflation (administration of powder formulation by syringe or any other similar device into the lungs) and aerosol inhalation. Aerosols (e.g., jet or ultrasonic nebulizers, metered-dose inhalers (MDIs), and dry-powder inhalers (DPIs)) can also be used in intranasal applications. Aerosol formulations are stable dispersions or suspensions of solid material and liquid droplets in a gaseous medium and can be placed into pressurized acceptable propellants, such as hydrofluroalkanes (HFAs, i.e. HFA-134a and HFA-227, or a mixture thereof), dichlorodifluoromethane (or other chlorofluocarbon propellants such as a mixture of Propellants 11,12, and/or 114), propane, nitrogen, and the like. Pulmonary formulations may include permeation enhancers such as fatty acids, and saccharides, chelating agents, enzyme inhibitors (e.g., protease inhibitors), adjuvants (e.g., glycocholate, surfactin, span 85, and nafamostat), preservatives (e.g., benzalkonium chloride or chlorobutanol), and ethanol (normally up to 5% but possibly up to 20%, by weight). Ethanol is commonly included in aerosol compositions as it can improve the function of the metering valve and in some cases also improve the stability of the dispersion. Pulmonary formulations may also include surfactants which include but are not limited to bile salts and those described in U.S. Pat. No. 6,524,557 and references therein. The surfactants described in U.S. Pat. No. 6,524,557, e.g., a C8-C16 fatty acid salt, a bile salt, a phospholipid, or alkyl saccaride are advantageous in that some of them also reportedly enhance absorption of the peptide in the formulation. Also suitable in the invention are dry powder formulations comprising a therapeutically effective amount of active compound blended with an appropriate carrier and adapted for use in connection with a dry-powder inhaler. Absorption enhancers which can be added to dry powder formulations of the present invention include those described in U.S. Pat. No. 6,632,456. WO 02/080884 describes new methods for the surface modification of powders. Aerosol formulations may include U.S. Pat. No. 5,230,884, U.S. Pat. No. 5,292,499, WO 017/8694, WO 01/78696, U.S. 2003019437, U.S. 20030165436, and WO 96/40089 (which includes vegetable oil). Sustained release formulations suitable for inhalation are described in U.S. 20010036481A1, 20030232019A1, and U.S. 20040018243A1 as well as in WO 01/13891, WO 02/067902, WO 03/072080, and WO 03/079885. Pulmonary formulations containing microparticles are described in WO 03/015750, U.S. 20030008013, and WO 00/00176. Pulmonary formulations containing stable glassy state powder are described in U.S. 20020141945 and U.S. Pat. No. 6,309,671. Other aerosol formulations are desribed in EP 1338272A1 WO 90/09781, U.S. Pat. No. 5,348,730, U.S. Pat. No. 6,436,367, WO 91/04011, and U.S. Pst. No. 6,294,153 and U.S. Pat. No. 6,290,987 describes a liposomal based formulation that can be administered via aerosol or other means. Powder formulations for inhalation are described in U.S. 20030053960 and WO 01/60341. The agents can be administered intranasally as described in U.S. 20010038824.

[0129] Solutions of medicament in buffered saline and similar vehicles are commonly employed to generate an aerosol in a nebulizer. Simple nebulizers operate on Bernoulli's principle and employ a stream of air or oxygen to generate the spray particles. More complex nebulizers employ ultrasound to create the spray particles. Both types are well known in the art and are described in standard textbooks of pharmacy such as Sprowls' American Pharmacy and Remington's The Science and Practice of Pharmacy. Other devices for generating aerosols employ compressed gases, usually hydrofluorocarbons and chlorofluorocarbons, which are mixed with the medicament and any necessary excipients in a pressurized container, these devices are likewise described in standard textbooks such as Sprowls and Remington.

[0130] The agents can be a free acid or base, or a pharmacologically acceptable salt thereof. Solids can be dissolved or dispersed immediately prior to administration or earlier. In some circumstances the preparations include a preservative to prevent the growth of microorganisms. The pharmaceutical forms suitable for injection can include sterile aqueous or organic solutions or dispersions which include, e.g., water, an alcohol, an organic solvent, an oil or other solvent or dispersant (e.g., glycerol, propylene glycol, polyethylene glycol, and vegetable oils). The formulations may contain antioxidants, buffers, bacteriostats, and solutes that render the formulation isotonic with the blood of the intended recipient, and aqueous and non-aqueous sterile suspensions that can include suspending agents, solubilizers, thickening agents, stabilizers, and preservatives. Pharmaceutical agents can be sterilized by filter sterilization or by other suitable means. The agent can be fused to immunoglobulins or albumin, or incorporated into a lipsome to improve half-life. The agent can also be conjugated to polyethylene glycol (PEG) chains. Methods for pegylation and additional formulations containing PEG-conjugates (i.e. PEG-based hydrogels, PEG modified liposomes) can be found in Harris and Chess, Nature Reviews Drug Discovery 2: 214-221 and the references therein. Peptides can also be modified with alkyl groups (e.g., C1-C20 straight or branched alkyl groups); fatty acid radicals; and combinations of PEG, alkyl groups and fatty acid radicals (see U.S. Pat. No. 6,309,633; Soltero et al., 2001 Innovations in Pharmaceutical Technology 106-110). The agent can be administered via a nanocochleate or cochleate delivery vehicle (BioDelivery Sciences International). The agents can be delivered transmucosally (i.e. across a mucosal surface such as the vagina, eye or nose) using formulations such as that described in U.S. Pat. No. 5,204,108. The agents can be formulated in microcapsules as described in WO 88/01165. The agent can be administered intra-orally using the formulations described in U.S. 20020055496, WO 00/47203, and U.S. Pat. No. 6,495,120. The agent can be delivered using nanoemulsion formulations described in WO 01/91728A2.

[0131] Suitable pharmaceutical compositions in accordance with the invention will generally include an amount of the active compound(s) with an acceptable pharmaceutical diluent or excipient, such as a sterile aqueous solution, to give a range of final concentrations, depending on the intended use. The techniques of preparation are generally well known in the art, as exemplified by Remington's Pharmaceutical Sciences (18th Edition, Mack Publishing Company, 1995).

[0132] The agents described herein and combination therapy agents can be packaged as a kit that includes single or multiple doses of two or more agents, each packaged or formulated individually, or single or multiple doses of two or more agents packaged or formulated in combination. Thus, one or more agents can be present in first container, and the kit can optionally include one or more agents in a second container. The container or containers are placed within a package, and the package can optionally include administration or dosage instructions. A kit can include additional components such as syringes or other means for administering the agents as well as diluents or other means for formulation.

[0133] Methods to increase chemical and/or physical stability of the agents the described herein are found in U.S. Pat. No. 6,541,606, U.S. Pat. No. 6,068,850, U.S. Pat. No. 6,124,261, U.S. Pat. No. 5,904,935, and WO 00/15224, U.S. 20030069182 (via the addition of nicotinamide), U.S. 20030175230A1, U.S. 20030175230A1, U.S. 20030175239A1, U.S. 20020045582, U.S. 20010031726, WO 02/26248, WO 03/014304, WO 98/00152A1, WO 98/00157A1, WO 90/12029, WO 00/04880, and WO 91/04743, WO 97/04796 and the references cited therein.

[0134] Methods to increase bioavailability of the agents described herein are found in U.S. Pat. No. 6,008,187, U.S. Pat. No. 5,424,289, U.S. 20030198619, WO 90/01329, WO 01/49268, WO 00/32172, and WO 02/064166. Glycyrrhizinate can also be used as an absorption enhancer (see, e.g., EP397447). WO 03/004062 discusses Ulex europaeus I (UEAI) and UEAI mimetics which may be used to target the agents of the invention to the GI tract.

[0135] The agents described herein can be fused to a modified version of the blood serum protein transferrin. U.S. 20030221201, U.S. 20040023334, U.S. 20030226155, WO 04/020454, and WO 04/019872 discuss the manufacture and use of transferrin fusion proteins. Transferrin fusion proteins may improve circulatory half life and efficacy, decrease undesirable side effects and allow reduced dosage.

### Combitherapy

### Analgesic Agents in Combitherapy

[0136] The chymotrypsin inhibitors described herein can be used in combination therapy with an analgesic agent, e.g., an analgesic compound or an analgesic peptide. These peptides and compounds can be administered with the agents of the invention (simultaneously or sequentially). They can also be optionally covalently linked or attached to an agent described herein to create therapeutic conjugates. Among the useful analgesic agents are: Ca channel blockers, 5HT receptor antagonists (for example 5HT3, 5HT4 and 5HT1 receptor antagonists), opioid receptor agonists (loperamide, fedotozine, and fentanyl), NK1 receptor antagonists, CCK receptor agonists (e.g., loxiglumide), NK1 receptor antagonists, NK3 receptor antagonists, norepinephrine-serotonin reuptake inhibitors (NSRI), vanilloid and cannabanoid receptor agonists, and sialorphin. Analgesics agents in the various classes are described in the literature.

[0137] Among the useful analgesic peptides are sialorphin-related peptides, including those comprising the amino acid sequence QHNPR (SEQ ID NO: ), including: VQHNPR (SEQ ID NO: ); VRQHNPR (SEQ ID NO: ); VRGQHNPR (SEQ ID NO: ); VRGPQHNPR (SEQ ID NO: ); VRGPRQHNPR (SEQ ID NO: ); VRGPRRQHNPR (SEQ ID NO: ); and RQHNPR (SEQ ID NO: ). Sialorphin-related peptides bind to neprilysin and inhibit neprilysin-mediated breakdown of substance P and Met-enkephalin. Thus, compounds or peptides that are inhibitors of neprilysin are useful analgesic agents which can be administered with the peptides of the invention in a co-therapy or linked to the peptides of the invention, e.g., by a covalent bond. Sialophin and related peptides are described in U.S. Pat. No. 6,589,750; U.S. 20030078200 A1; and WO 02/051435 A2.

[0138] Opioid receptor antagonists and agonists can be administered with the agents of the invention in co-therapy or linked to the agent of the invention, e.g., by a covalent bond. For example, opioid receptor antagonists such as naloxone, naltrexone, methyl nalozone, nalmefene, cypridime, beta funaltrexamine, naloxonazine, naltrindole, and nor-binaltorphimine are thought to be useful in the treatment of IBS. It can be useful to formulate opioid antagonists of this type is a delayed and sustained release formulation such that initial release of the antagonist is in the mid to distal small intestine and/or ascending colon. Such antagonists are described in WO 01/32180 A2. Enkephalin pentapeptide (HOE825; Tyr-D-Lys-Gly-Phe-L-homoserine) is an agonist of the mu and delta opioid receptors and is thought to be useful for increasing intestinal motility (Eur. J Pharm. 219:445, 1992), and this peptide can be used in conjunction with the peptides of the invention. Also useful is trimebutine which is thought to bind to mu/delta/kappa opioid receptors and activate release of motilin and modulate the release of gastrin, vasoactive intestinal peptide, gastrin and glucagons. Kappa opioid receptor agonists such as fedotozine, asimadoline, and ketocyclazocine, and compounds described in WO 03/097051 A2 can be used with or linked to the agents of the invention. In addition, mu opioid receptor agonists such as morphine, diphenyloxylate, frakefamide (H-Tyr-D-Ala-Phe(F)-Phe-NH₂; WO 01/019849 A1) and loperamide can be used.

[0139] Tyr-Arg (kyotorphin) is a dipeptide that acts by stimulating the release of metenkephalins to elicit an analgesic effect (J. Biol. Chem 262:8165, 1987). Kyotorphin can be used with or linked to the agents of the invention.

[0140] Chromogranin-derived peptide (CgA 47-66; see, e.g., Ghia et al. 2004 Regulatory Peptides 119:199) can be used with or linked to the agents of the invention.

[0141] CCK receptor agonists such as caerulein from amphibians and other species are useful analgesic agents that can be used with or linked to the agents of the invention.

[0142] Conotoxin peptides represent a large class of analgesic peptides that act at voltage gated Ca channels, NMDA receptors or nicotinic receptors. These peptides can be used with or linked to the agents of the invention.

[0143] Peptide analogs of thymulin (FR Application 2830451) can have analgesic activity and can be used with or linked to the agents of the invention.

[0144] CCK (CCKa or CCKb) receptor antagonists, including loxiglumide and dexloxiglumide (the R-isomer of loxiglumide) (WO 88/05774) can have analgesic activity and can be used with or linked to the peptides of the invention.

[0145] Other useful analgesic agents include 5-HT4 agonists such as tegaserod/zelnorm and lirexapride. Such agonists are described in: EP1321142 A1, WO 03/053432A1, EP 505322 A1, EP 505322 B1, U.S. Pat. No. 5,510,353, EP 507672 A1, EP 507672 B1, and U.S. Pat. No. 5,273,983.

[0146] Calcium channel blockers such as ziconotide and related compounds described in, for example, EP625162B1, U.S. Pat. No. 5,364,842, U.S. Pat. No. 5,587,454, U.S. Pat. No. 5,824,645, U.S. Pat. No. 5,859,186, U.S. Pat. No. 5,994,305, U.S. Pat. No. 6,087,091, U.S. Pat. No. 6,136,786, WO 93/13128 A1, EP 1336409 A1, EP 835126 A1, EP 835126 B1, U.S. Pat. No. 5,795,864, U.S. Pat. No. 5,891,849, U.S. Pat. No. 6,054,429, WO 97/01351 A1, can be used with or linked to the agents of the invention.

[0147] Various antagonists of the NK-1, NK-2, and NK-3 receptors (for a review see Giardina et al. 2003 Drugs 6:758) can be can be used with or linked to the agents of the invention.

[0148] NK1 receptor antagonists such as: aprepitant (Merck & Co Inc), vofopitant, ezlopitant (Pfizer, Inc.), R-673 (Hoffmann-La Roche Ltd), SR-14033 and related compounds described in, for example, EP 873753 A1, US 20010006972 A1, U.S. 20030109417 A1, WO 01/52844 A1, can be used with or linked to the agents of the invention.

[0149] NK-2 receptor antagonists such as nepadutant (Menarini Ricerche SpA), saredutant (Sanofi-Synthelabo), SR-144190 (Sanofi-Synthelabo) and UK-290795 (Pfizer Inc) can be used with or linked to the agents of the invention.

[0150] NK3 receptor antagonists such as osanetant (SR-142801; Sanofi-Synthelabo), SSR-241586 talnetant and related compounds described in, for example, WO 02/094187 A2, EP 876347 A1, WO 97/21680 A1, U.S. Pat. No. 6,277,862, WO 98/11090, WO 95/28418, WO 97/19927, and Boden et al. (J Med Chem. 39:1664-75, 1996) can be used with or linked to the agents of the invention.

[0151] Norepinephrine-serotonin reuptake inhibitors such as milnacipran and related compounds described in WO 03/077897 A1 can be used with or linked to the agents of the invention.

[0152] Vanilloid receptor antagonists such as arvanil and related compounds described in WO 01/64212 A1 can be used with or linked to the peptides of the invention.

[0153] Where the analgesic is a peptide and is covalently linked to an agent described herein the resulting peptide may also include at least one trypsin cleavage site. When present within the peptide, the analgesic peptide may be preceded by (if it is at the carboxy terminus) or followed by (if it is at the amino terminus) a trypsin cleavage site that allows release of the analgesic peptide.

[0154] In addition to sialorphin-related peptides, analgesic peptides include: AspPhe, endomorphin-1, endomorphin-2, nocistatin, dalargin, lupron, zicnotide, and substance P.

### Other Agents for Use in Combitherapy

[0155] Also within the invention are pharmaceutical compositions comprising a chymotrypsin inhibitor and a second therapeutic agent. The second therapeutic agent can be administered to treat any condition for which it is useful, including conditions that are not considered to be the primary indication for treatment with the second therapeutic agent.

[0156] Examples of additional therapeutic agents to treat gastrointestinal and other disorders include:
[0157] (1) agents to treat constipation (e.g., a chloride channel activator such as SPI-0211; Sucampo Pharmaceuticals, Inc.; Bethesda, Md., a laxative such as MiraLax; Braintree Laboratories, Braintree Mass.);
[0158] (2) acid reducing agents such as proton pump inhibitors (e.g., omeprazole, esomeprazole, lansoprazole, pantorazole and rabeprazole) and Histamine H2-receptor antagonist (also known as H2 receptor blockers including cimetidine, ranitidine, famotidine and nizatidine);
[0159] (3) prokinetic agents including metoclopramide (Reglan®), domperidone (Motilium®), erythromycin or cisapride (propulsid®)
[0160] (4) pro-motility agents such as the vasostatin-derived peptide, chromogranin A (4-16) (see, e.g., Ghia et al. 2004 Regulatory Peptides 121:31) or motilin agonists (e.g., GM-611 or mitemcinal fumarate);
[0161] (5) complete or partial 5HT (e.g. 5HT1, 5HT2, 5HT3, 5HT4) receptor agonists or antagonists (including 5HT4 receptor agonists such as tegaserod (ZELNORM®), mosapride and renzapride; 5HT3 receptor agonists such as MKC-733; and 5HT3 receptor antagonists such as alosetron and ATI-7000 (Aryx Therapeutics, Santa Clara Calif.);
[0162] (6) muscarinic receptor agonists;
[0163] (7) anti-inflammatory agents;
[0164] (8) antispasmodics;
[0165] (9) antidepressants;
[0166] (10) centrally-acting analgesic agents such as opioid receptor agonistsopioid receptor antagonists (e.g., naltrexone);
[0167] (11) agents for the treatment of Inflammatory bowel disease;
[0168] (12) agents for the treatment of Crohn's disease and/or ulcerative colitis (e.g., alequel (Enzo Biochem, Inc.; Farmingsale, N.Y.), the anti-inflammatory peptide RDP58 (Genzyme, Inc.; Cambridge, Mass.), and TRAFICET-EN™ (ChemoCentryx, Inc.; San Carlos, Calif.);
[0169] (13) agents that treat gastrointestinal or visceral pain;
[0170] (14) PDE (phosphodiesterase) inhibitors including but not limited to those disclosed in U.S. Pat. No. 6,331,543 and cilomilast, cilostamide, denbufyllene piclamilast, filaminast, milrinone, pentoxifylline, roflumilast, rolipram, sildenafil(Viagra®), tadalafil(Cialis®), theophylline, vardenafil(Levitra®), zaprinast, and zardaverine.
[0171] (15) purgatives that draw fluids to the intestine (e.g., VISICOL®, a combination of sodium phosphate monobasic monohydrate and sodium phosphate dibasic anhydrate);
[0172] (16) Corticotropin Releasing Factor (CRF) receptor antagonists (NBI-34041; Neurocrine Biosciences, San Diego, Calif.);
[0173] (17) glucagon-like peptides (glp-1) and analogues thereof (including exendin-4) and inhibitors of DPP-IV (DPP-IV mediates the inactivation of glp-1); and
[0174] (18) the probiotic PROBACTRIX® (The BioBalance Corporation; New York, NY) which contains microorganisms useful in the treatment of gastrointestinal disorders.

[0175] The agents of the invention can be used in combination therapy with insulin and related compounds including primate, rodent, or rabbit insulin including biologically active variants thereof including allelic variants, more preferably human insulin available in recombinant form. Sources of human insulin include pharmaceutically acceptable and sterile formulations such as those available from Eli Lilly (Indianapolis, Ind. 46285) as Humulin.™. (human insulin rDNA origin). See the THE PHYSICIAN'S DESK REFERENCE, 55.sup.th Ed. (2001) Medical Economics, Thomson Healthcare (disclosing other suitable human insulins). The agents of the invention can also be used in combination therapy with agents that can boost insulin effects or levels of a subject upon administration, e.g. glipizide and/or rosiglitazone.

[0176] The agents of the invention can also be used in combination with agents such a tianeptine (STABLON®) and other agents described in U.S. Pat. No. 6,683,072; (E)-4 (1,3bis(cyclohexylmethyl)-1,2,34,-tetrahydro-2,6-diono-9H-purin-8-yl)cinnamic acid nonaethylene glycol methyl ether ester and related compounds described in WO 02/067942.

[0177] The agents of the invention can also be used in combination therapy with agents (e.g., aldolor) for the treatment of postoperative ileus.

[0178] The agents of the invention can be used in combination therapy with an anti-hypertensive agent including but not limited to:
[0179] (1) diuretics, such as thiazides, including chlorthalidone, chlorthiazide, dichlorophenamide, hydroflumethiazide, indapamide, polythiazide, and hydrochlorothiazide; loop diuretics, such as bumetanide, ethacrynic acid, furosemide, and torsemide; potassium sparing agents, such as amiloride, and triamterene; and aldosterone antagonists, such as spironolactone, epirenone, and the like;
[0180] (2) beta-adrenergic blockers such as acebutolol, atenolol, betaxolol, bevantolol, bisoprolol, bopindolol, carteolol, carvedilol, celiprolol, esmolol, indenolol, metaprolol, nadolol, nebivolol, penbutolol, pindolol, propanolol, sotalol, tertatolol, tilisolol, and timolol, and the like;
[0181] (3) calcium channel blockers such as amlodipine, aranidipine, azelnidipine, bamidipine, benidipine, bepridil, cinaldipine, clevidipine, diltiazem, efonidipine, felodipine, gallopamil, isradipine, lacidipine, lemildipine, lercanidipine, nicardipine, nifedipine, nilvadipine, nimodepine, nisoldipine, nitrendipine, manidipine, pranidipine, and verapamil, and the like;
[0182] (4) angiotensin converting enzyme (ACE) inhibitors such as benazepril; captopril; ceranapril; cilazapril; delapril; enalapril; enalopril; fosinopril; imidapril; lisinopril; losinopril; moexipril; quinapril; quinaprilat; ramipril; perindopril; perindropril; quanipril; spirapril; tenocapril; trandolapril, and zofenopril, and the like;
[0183] (5) neutral endopeptidase inhibitors such as omapatrilat, cadoxatril and ecadotril, fosidotril, sampatrilat, AVE7688, ER4030, and the like;
[0184] (6) endothelin antagonists such as tezosentan, A308165, and YM62899, and the like;
[0185] (7) vasodilators such as hydralazine, clonidine, minoxidil, and nicotinyl alcohol, and the like;
[0186] (8) angiotensin II receptor antagonists such as aprosartan, candesartan, eprosartan, irbesartan, losartan, olmesartan, pratosartan, tasosartan, telmisartan, valsartan, and EXP-3137, F16828K, and RNH6270, and the like;
[0187] (9) α/β adrenergic blockers such as nipradilol, arotinolol and amosulalol, and the like;
[0188] (10) alpha 1 blockers, such as terazosin, urapidil, prazosin, tamsulosin, bunazosin, trimazosin, doxazosin, naftopidil, indoramin, WHP 164, and XEN010, and the like;
[0189] (11) alpha 2 agonists such as lofexidine, tiamenidine, moxonidine, rilmenidine and guanobenz, and the like;
[0190] (12) aldosterone inhibitors, and the like; and
[0191] (13) angiopoietin-2-binding agents such as those disclosed in WO03/030833.

[0192] The agents of the invention can be used in combination therapy with one or more of the following agents useful in the treatment of respiratory and other disorders:
[0193] (1) β-agonists including but not limited to: albuterol (PROVENTIL®, SALBUTAMO1®, VENTOLIN®), bambuterol, bitoterol, clenbuterol, fenoterol, formoterol, isoetharine (BRONKOSOL®), BRONKOMETER®), metaproterenol (ALUPENT®, METAPREL®), pirbuterol (MAXAIR®), reproterol, rimiterol, salmeterol, terbutaline (BRETHAIRE(®, BRETHINE®, BRICANYL®), adrenalin, isoproterenol (ISUPREL®), epinephrine bitartrate (PRIMATENE®), ephedrine, orciprenline, fenoterol and isoetharine;
[0194] (2) steroids, including but not limited to beclomethasone, beclomethasone dipropionate, betamethasone, budesonide, bunedoside, butixocort, dexamethasone, flunisolide, fluocortin, fluticasone, hydrocortisone, methyl prednisone, mometasone, predonisolone, predonisone, tipredane, tixocortal, triamcinolone, and triamcinolone acetonide;
[0195] (3) β2-agonist-corticosteroid combinations [e.g., salmeterol-fluticasone (ADVAIR®), formoterol-budesonid (SYMBICORT®)];
[0196] (4) leukotriene D4 receptor antagonists/leukotriene antagonists/LTD4 antagonists (i.e., any compound that is capable of blocking, inhibiting, reducing or otherwise interrupting the interaction between leukotrienes and the Cys LTI receptor) including but not limited to: zafirlukast, montelukast, montelukast sodium (SINGULAIR®), pranlukast, iralukast, pobilukast, SKB-106,203 and compounds described as having LTD4 antagonizing activity described in U.S. Pat. No. 5,565,473;
[0197] (5) 5-lipoxygenase inhibitors and/or leukotriene biosynthesis inhibitors [e.g., zileuton and BAY1005 (CA registry 128253-31-6)];
[0198] (6) histamine H1 receptor antagonists/antihistamines (i.e., any compound that is capable of blocking, inhibiting, reducing or otherwise interrupting the interaction between histamine and its receptor) including but not limited to: astemizole, acrivastine, antazoline, azatadine, azelastine, astamizole, bromopheniramine, bromopheniramine maleate, carbinoxamine, carebastine, cetirizine, chlorpheniramine, chloropheniramine maleate, cimetidine ,clemastine, cyclizine, cyproheptadine, descarboethoxyloratadine, dexchlorpheniramine, dimethindene, diphenhydramine, diphenylpyraline, doxylamine succinate, doxylamine, ebastine, efletirizine, epinastine, famotidine, fexofenadine, hydroxyzine, hydroxyzine, ketotifen, levocabastine, levocetirizine, levocetirizine, loratadine, meclizine, mepyramine, mequitazine, methdilazine, mianserin, mizolastine, noberastine, norasternizole, noraztemizole, phenindamine, pheniramine, picumast, promethazine, pynlamine, pyrilamine, ranitidine, temelastine, terfenadine, trimeprazine, tripelenamine, and triprolidine;
[0199] (7) an anticholinergic including but not limited to: atropine, benztropine, biperiden, flutropium, hyoscyamine, ilutropium, ipratropium, ipratropium bromide, methscopolamine, oxybutinin, rispenzepine, scopolamine, and tiotropium;
[0200] (8) an anti-tussive including but not limited to: dextromethorphan, codeine, and hydromorphone;
[0201] (9) a decongestant including but not limited to: pseudoephedrine and phenylpropanolamine;
[0202] (10) an expectorant including but not limited to: guafenesin, guaicolsulfate, terpin, ammonium chloride, glycerol guaicolate, and iodinated glycerol;
[0203] (11) a bronchodilator including but not limited to: theophylline and aminophylline;
[0204] (12) an anti-inflammatory including but not limited to: fluribiprofen, diclophenac, indomethacin, ketoprofen, S-ketroprophen, tenoxicam;
[0205] (13) a PDE inhibitor including but not limited to those disclosed in U.S. Pat. No. 6,331,543 and cilomilast, cilostamide, denbufyllene piclamilast, filaminast, milrinone, pentoxifylline, roflumilast, rolipram, sildenafil(Viagra®), tadalafil(Cialis(®), theophylline, vardenafil(Levitra®), zaprinast, and zardaverine;
[0206] (14) a recombinant humanized monoclonal antibody [e.g. xolair (also called omalizumab), rhuMab, and talizumab];
[0207] (15) a humanized lung surfactant including recombinant forms of surfactant proteins SP-B, SP-C or SP-D [e.g. SURFAXIN®, formerly known as dsc-104 (Discovery Laboratories)],
[0208] (16) agents that inhibit epithelial sodium channels (ENaC) such as amiloride and related compounds;
[0209] (17) antimicrobial agents used to treat pulmonary infections such as acyclovir, amikacin, amoxicillin, doxycycline, trimethoprin sulfamethoxazole, amphotericin B, azithromycin, clarithromycin, roxithromycin, clarithromycin, cephalosporins( ceffoxitin, cefmetazole etc), ciprofloxacin, ethambutol, gentimycin, ganciclovir, imipenem, isoniazid, itraconazole, penicillin, ribavirin, rifampin, rifabutin,amantadine, rimantidine, streptomycin, tobramycin, and vancomycin;
[0210] (18) agents that activate chloride secretion through Ca++ dependent chloride channels (such as purinergic receptor (P2Y(2) agonists);
[0211] (19) agents that decrease sputum viscosity, such as human recombinant DNase 1, (Pulmozyrne®);
[0212] (20) nonsteroidal anti-inflammatory agents (acemetacin, acetaminophen, acetyl salicylic acid, alclofenac, alminoprofen, apazone, aspirin, benoxaprofen, bezpiperylon, bucloxic acid, carprofen, clidanac, diclofenac, diclofenac, diflunisal, diflusinal, etodolac, fenbufen, fenbufen, fenclofenac, fenclozic acid, fenoprofen, fentiazac, feprazone, flufenamic acid, flufenisal, flufenisal, fluprofen, flurbiprofen, flurbiprofen, furofenac, ibufenac, ibuprofen, indomethacin, indomethacin, indoprofen, isoxepac, isoxicam, ketoprofen, ketoprofen, ketorolac, meclofenamic acid, meclofenamic acid, mefenamic acid, mefenamic acid, miroprofen, mofebutazone, nabumetone oxaprozin, naproxen, naproxen, niflumic acid, oxaprozin, oxpinac, oxyphenbutazone, phenacetin, phenylbutazone, phenylbutazone, piroxicam, piroxicam, pirprofen, pranoprofen, sudoxicam,tenoxican, sulfasalazine, sulindac, sulindac, suprofen, tiaprofenic acid, tiopinac, tioxaprofen, tolfenamic acid, tolmetin, tolmetin, zidometacin, zomepirac, and zomepirac); and
[0213] (21) aerosolized antioxidant therapeutics such as S-Nitrosoglutathione.

[0214] The agents of the invention can be used in combination therapy with an anti-obesity agent including but not limited to:
[0215] (1) 11βHSD-1 (11-beta hydroxy steroid dehydrogenase type 1) inhibitors, such as BVT 3498, BVT 2733, 3-(1-adamantyl)-4-ethyl-5-(ethylthio)-4H-1,2,4-triazole, 3-(1-adamantyl)-5-(3,4,5-trimethoxyphenyl)-4-methyl-4H-1,2,4-triazole, 3-adamantanyl-4,5,6,7,8,9,10,11,12,3α-decahydro-1,2,4-triazolo[4,3-α][11]annulene, and those compounds disclosed in WO01/90091, WO01/90090, WO01/90092 and WO02/072084;
[0216] (2) 5HT (serotonin) transporter inhibitors, such as paroxetine, fluoxetine, fenfluramine, fluvoxamine, sertraline, and imipramine, and those disclosed in WO03/00663;
[0217] (3) 5HT antagonists such as those in WO03/037871, WO03/037887, and the like;
[0218] (4) 5HT1a modulators such as those disclosed in WO03/031439, and the like;
[0219] (5) 5HT-2 agonists;
[0220] (6) 5HT2c (serotonin receptor 2c) agonists, such as BVT933, DPCA37215, IK264, PNU 22394, WAY161503, R-1065, and YM 348 and those disclosed in U.S. Pat. No. 3,914,250 and PCT publication Nos. WO02/36596, WO02/48124, WO02/10169, WO01/66548, WO02/44152, WO02/51844, WO02/40456, and WO02/40457;
[0221] (7) 5HT6 receptor modulators, such as those in WO03/030901, WO03/035061, WO03/039547, and the like;
[0222] (8) ACC2 (acetyl-CoA carboxylase-2) inhibitors;
[0223] (9) acyl-estrogens, such as oleoyl-estrone, disclosed in del Mar-Grasa, M. et al., Obesity Research, 9:202-9 (2001) and Japanese Patent Application No. JP 2000256190;
[0224] (10) alpha-lipoic acid (alpha-LA);
[0225] (11) anorectic bicyclic compounds such as 1426 (Aventis) and 1954 (Aventis), and the compounds disclosed in WO00/18749, WO01/32638, WO01/62746, WO01/62747, and WO03/015769;
[0226] (12) AOD9604;
[0227] (13) appetite suppressants such as those in WO03/40107;
[0228] (14) ATL-962 (Alizyme PLC);
[0229] (15) benzocaine;
[0230] (16) benzphetamine hydrochloride (Didrex);
[0231] (17) bladderwrack (focus vesiculosus);
[0232] (18) BRS3 (bombesin receptor subtype 3) agonists;
[0233] (19) bupropion;
[0234] (20) caffeine;
[0235] (21) CB 1 (cannabinoid-1 receptor) antagonist/inverse agonists, such as rimonabant (Acomplia; Sanofi Synthelabo), SR-147778 (Sanofi Synthelabo), BAY 65-2520 (Bayer), and SLV 319 (Solvay), and those disclosed in U.S. Pat. Nos. 4,973,587, 5,013,837, 5,081,122, 5,112,820, 5,292,736, 5,532,237, 5,624,941, 6,028,084, and 6,509,367 and WO96/33159, WO97/29079, WO98/31227, WO98/33765, WO98/37061, WO98/41519, WO98/43635, WO98/43636, WO99/02499, WO00/10967, WO00/10968, WO01/09120, WO01/58869, WO01/64632, WO01/64633, WO01/64634, WO01/70700, WO01/96330, WO02/076949, WO03/006007, WO03/007887, WO03/020217, WO03/026647, WO03/026648, WO03/027069, WO03/027076, WO03/027114, WO03/037332, WO03/040107, WO03/086940, WO03/084943 and U.S. Pat. No. 6,509,367 and EPO Application No. EP-658546;
[0236] (22) CCK agonists;
[0237] (23) CCK-A (cholecystokinin-A) agonists, such as AR-R 15849, GI 181771, JMV-180, A-71378, A-71623 and SR146131, and those discribed in U.S. Pat. No. 5,739,106;
[0238] (24) chitosan;
[0239] (25) chromium;
[0240] (26) CNTF (Ciliary neurotrophic factors), such as GI-181771 (Glaxo-SmithKline), SR146131 (Sanofi Synthelabo), butabindide, PD170,292, and PD 149164 (Pfizer);
[0241] (27) CNTF derivatives, such as axokine (Regeneron), and those disclosed in PCT Application Nos. WO 94/09134, WO 98/22128, and WO 99/43813;
[0242] (28) conjugated linoleic acid;
[0243] (29) corticotropin-releasing hormone agonists;
[0244] (30) dehydroepiandrosterone;
[0245] (31) DGAT1 (diacylglycerol acyltransferase 1) inhibitors;
[0246] (32) DGAT2 (diacylglycerol acyltransferase 2) inhibitors;
[0247] (33) dicarboxylate transporter inhibitors;
[0248] (34) diethylpropion hydrochloride (Tenuate);
[0249] (35) dipeptidyl peptidase IV (DP-IV) inhibitors, such as isoleucine thiazolidide, valine pyrrolidide, NVP-DPP728, LAF237, P9301, TSL 225, TMC-2A/2B/2C, FE 999011, P9310/K364, VIP 0177, SDZ 274-444 and the compounds disclosed in PCT publication Nos. WO02/083128, WO02/062764, WO03/000180, WO03/000181, WO03/000250, WO03/002530, WP03/002531, WO03/002553, WO03/002593, WO03/004498, WO03/004496, WO03/017936, WO03/024942, WO03/024965, WO03/033524, WO03/037327 and EP1258476;
[0250] (36) ephedra;
[0251] (37) exendin-4 (an inhibitor of glp-1)
[0252] (38) FAS (fatty acid synthase) inhibitors, such as Cerulenin and C75;
[0253] (39) fat resorption inhibitors such as those in WO03/053451, and the like;
[0254] (40) fatty acid transporter inhibitors;
[0255] (41) fiber (psyllium, plantago, guar fiber);
[0256] (42) galanin antagonists;
[0257] (43) galega (Goat's Rue, French Lilac);
[0258] (44) garcinia cambogia;
[0259] (45) germander (teucrium chamaedrys);
[0260] (46) ghrelin antagonists, such as those disclosed in PCT Application Nos. WO 01/87335, and WO 02/08250;
[0261] (47) GLP-1 (glucagon-like peptide 1) agonists (e.g. exendin-4);
[0262] (48) glp-1 (glucagon-like peptide-1);
[0263] (49) glucocorticoid antagonists;
[0264] (50) glucose transporter inhibitors;
[0265] (51) growth hormone secretagogue receptor agonists/antagonists, such as NN703, hexarelin, MK-0677, SM-130686, CP-424,391, L-692,429 and L-163,255, and such as those disclosed in U.S. Pat. No. 6,358,951, U.S. Patent Application Nos. 2002/049196 and 2002/022637, and PCT Application Nos. WO 01/56592 and WO 02/32888;
[0266] (52) growth hormone secretagogues, such as those disclosed and specifically described in U.S. Pat. No. 5,536,716;
[0267] (53) H3 (histamine H3) antagonist/inverse agonists, such as thioperamide, 3-(1H-imidazol-4-yl)propyl N-(4-pentenyl)carbamate), clobenpropit, iodophenpropit, imoproxifan, GT2394 (Gliatech), and A331440, and those disclosed in PCT publication No. WO02/15905 and O-[3-(1H-imidazol-4-yl)propanol]carbamates (Kiec-Kononowicz, K. et al., Pharmazie, 55:349-55 (2000)), piperidine-containing histamine H3-receptor antagonists (Lazewska, D. et al., Pharmazie, 56:927-32 (2001), benzophenone derivatives and related compounds (Sasse, A. et al., Arch. Pharm.(Weinheim) 334:45-52 (2001)), substituted N-phenylcarbamates (Reidemeister, S. et al., Pharmazie, 55:83-6 (2000)), and proxifan derivatives (Sasse, A. et al., J. Med. Chem. 43:3335-43 (2000)) and histamine H3 receptor modulators such as those disclosed in WO03/024928 and WO03/024929;
[0268] (54) interleukin-6 (IL-6) and modulators thereof, as in WO03/057237, and the like;
[0269] (55) L-camitine;
[0270] (56) leptin derivatives, such as those disclosed in U.S. Pat. Nos. 5,552,524, 5,552,523, 5,552,522, 5,521,283, and PCT International Publication Nos. WO 96/23513, WO 96/23514, WO 96/23515, WO 96/23516, WO 96/23517, WO 96/23518, WO 96/23519, and WO 96/23520;
[0271] (57) leptin, including recombinant human leptin (PEG-OB, Hoffman La Roche) and recombinant methionyl human leptin (Amgen);
[0272] (58) lipase inhibitors, such as tetrahydrolipstatin (orlistat/Xenical®), Triton WR1339, RHC80267, lipstatin, teasaponin, and diethylumbelliferyl phosphate, FL-386, WAY-121898, Bay-N-3176, valilactone, esteracin, ebelactone A, ebelactone B, and RHC 80267, and those disclosed in PCT publication No. WO01/77094, and U.S. Pat. Nos. 4,598,089, 4,452,813, 5,512,565, 5,391,571, 5,602,151, 4,405,644, 4,189,438, and 4,242,453;
[0273] (59) lipid metabolism modulators such as maslinic acid, erythrodiol, ursolic acid uvaol, betulinic acid, betulin, and the like and compounds disclosed in WO03/011267;
[0274] (60) Mc3r (melanocortin 3 receptor) agonists;
[0275] (61) Mc4r (melanocortin 4 receptor) agonists, such as CHIR86036 (Chiron), ME-10142, ME-10145, and HS-131 (Melacure), and those disclosed in PCT publication Nos. WO99/64002, WO00/74679, WO01/991752, WO01/25192, WO01/52880, WO01/74844, WO01/70708, WO01/70337, WO01/91752, WO02/059095, WO02/059107, WO02/059108, WO02/059117, WO02/06276, WO02/12166, WO02/11715, WO02/12178, WO02/15909, WO02/38544, WO02/068387, WO02/068388, WO02/067869, WO02/081430, WO03/06604, WO03/007949, WO03/009847, WO03/009850, WO03/013509, and WO03/031410;
[0276] (62) Mc5r (melanocortin 5 receptor) modulators, such as those disclosed in WO97/19952, WO00/15826, WO00/15790, US 20030092041;
[0277] (63) MCH2R (melanin concentrating hormone 2R) agonist/antagonists;
[0278] (64) melanin concentrating hormone antagonists;
[0279] (65) melanin-concentrating hormone 1 receptor (MCHR) antagonists, such as T-226296 (Takeda), SNP-7941 (Synaptic), and those disclosed WO01/21169, WO01/82925, WO01/87834, WO02/051809, WO02/06245, WO02/076929, WO02/076947, WO02/04433, WO02/51809, WO02/083134, WO02/094799, WO03/004027, WO03/13574, WO03/15769, WO03/028641, WO03/035624, WO03/033476, WO03/033480 and Japanese Patent Application Nos. JP 13226269, and JP1437059;
[0280] (66) melanocortin agonists, such as Melanotan II or those described in WO 99/64002 and WO 00/74679;
[0281] (67) Metformin (GLUCOPHAGE®);
[0282] (68) mGluR5 modulators such as those disclosed in WO03/029210, WO03/047581, WO03/048137, WO03/051315, WO03/051833, WO03/053922, WO03/059904, and the like;
[0283] (69) monoamine reuptake inhibitors, such as sibutratmine (Meridia®/Reductil®) and salts thereof, and those compounds disclosed in U.S. Pat. Nos. 4,746,680, 4,806,570, and 5,436,272, and U.S. Patent Publication No. 2002/0006964, and WO01/27068, and WO01/62341;
[0284] (70) NE (norepinephrine) transport inhibitors, such as GW 320659, despiramine, talsupram, and nomifensine;
[0285] (71) nomame herba;
[0286] (72) non-selective serotonin/norepinephrine transport inhibitors, such as sibutramine or fenfluramine;
[0287] (73) NPY 1 antagonists, such as BIBP3226, J-115814, BIBO 3304, LY-357897, CP-671906, GI-264879A, and those disclosed in U.S. Pat. No. 6,001,836, and PCT Patent Publication Nos. WO 96/14307, WO 01/23387, WO 99/51600, WO 01/85690, WO 01/85098, WO 01/85173, and WO 01/89528;
[0288] (74) NPY5 (neuropeptide Y Y5) antagonists, such as 152,804, GW-569180A, GW-594884A, GW-587081X, GW-548118X, FR235208, FR226928, FR240662, FR252384, 1229U91, GI-264879A, CGP71683A, LY-377897, LY-366377, PD-160170, SR-120562A, SR-120819A, JCF-104, and H409/22 and those compounds disclosed in U.S. Pat. Nos. 6,140,354, 6,191,160, 6,258,837, 6,313,298, 6,326,375, 6,329,395, 6,335,345, 6,337,332, 6,329,395, and 6,340,683, European Patent Nos. EP-01010691, and EP-01044970 and PCT Publication Nos. WO97/19682, WO97/20820, WO97/20821, WO97/20822, WO97/20823, WO98/27063, WO00/107409, WO00/185714, WO00/185730, WO00/64880, WO00/68197, WO00/69849, WO01/09120, WO01/14376, WO01/85714, WO01/85730, WO01/07409, WO01/02379, WO01/23388, WO01/23389, WO01/44201, WO01/62737, WO01/62738, WO01/09120, WO02/20488, W002/22592, WO02/48152, WO02/49648, WO02/051806, WO02/094789, W003/009845, WO03/014083, WO03/022849, WO03/028726 and Norman et al., J. Med. Chem. 43:4288-4312 (2000);
[0289] (75) opioid antagonists, such as nalmefene (REVEX®), 3-methoxynaltrexone, naloxone, and naltrexone and those disclosed in WO00/21509;
[0290] (76) orexin antagonists, such as SB-334867-A and those disclosed in PCT publication Nos. WO01/96302, WO01/68609, WO02/44172, WO02/51232, WO02/51838, WO02/089800, WO02/090355, WO03/023561, WO03/032991, and WO03/037847;
[0291] (77) PDE (phosphodiesterase) inhibitors including but not limited to those disclosed in U.S. Pat. No. 6,331,543 and cilomilast, cilostamide, denbufyllene piclamilast, filaminast, milrinone, pentoxifylline, roflumilast, rolipram, sildenafil(Viagra®), tadalafil(Cialis®), theophylline, vardenafil(Levitra®), zaprinast, and zardaverine;
[0292] (78) peptide YY and fragments and variants thereof (e.g. YY3-36 (PYY3-36)(N. Engl. J. Med. 349:941,2003; IKPEAPGE DASPEELNRY YASLRHYLNL VTRQRY (SEQ ID NO:XXX)) and PYY agonists such as those disclosed in WO03/026591;
[0293] (79) phendimetrazine;
[0294] (80) phentermine,
[0295] (81) phosphate transporter inhibitors;
[0296] (82) phosphodiesterase-3B (PDE3B) inhibitors;
[0297] (83) phytopharm compound 57 (CP 644,673);
[0298] (84) pyruvate;
[0299] (85) SCD-1 (stearoyl-CoA desaturase-1) inhibitors;
[0300] (86) serotonin reuptake inhibitors, such as dexfenfluramine, fluoxetine, and those in U.S. Pat. No. 6,365,633, and WO01/27060, and WO01/162341;
[0301] (87) T71 (Tularik; Inc.; Boulder Co.);
[0302] (88) thyroid hormone β agonists, such as KB-2611 (KaroBioBMS), and those disclosed in WO02/15845 and Japanese Patent Application No. JP 2000256190;
[0303] (89) Topiramate (TOPIMAX®);
[0304] (90) transcription factor modulators such as those disclosed in WO03/026576;
[0305] (91) UCP-1 (uncoupling protein-1), 2, or 3 activators, such as phytanic acid, 4-[(E)-2-(5,6,7,8-tetrahydro-5,5,8,8-tetramethyl-2-napthalenyl)-1-propeny-1]benzoic acid (TTNPB), retinoic acid, and those disclosed in PCT Patent Application No. WO 99/00123;
[0306] (92) β3 (beta adrenergic receptor 3) agonists, such as AD9677/TAK677 (Dainippon/Takeda), CL-316,243, SB 418790, BRL-37344, L-796568, BMS-196085, BRL-35135A, CGP12177A, BTA-243, GW 427353, Trecadrine, Zeneca D7114, N-5984 (Nisshin Kyorin), LY-377604 (Lilly), and SR 591 19A, and those disclosed in U.S. Pat. No. 5,705,515, U.S. Pat. No. 5,451,677 and PCT publication Nos. WO94/18161, WO95/29159, WO97/46556, WO98/04526 and WO98/32753, WO01/74782, WO02/32897, WO03/014113, WO03/016276, WO03/016307, WO03/024948, WO03/024953 and WO03/037881;
[0307] (93) β-hydroxy steroid dehydrogenase-1 inhibitors (β-HSD-1) and
[0308] (94) β-hydroxy-β-methylbutyrate.

### Methods of Treatment

[0309] Chymotrypsin inhibitors can be used to treat conditions in which it would be useful to potentiate the action of guanylin whether the guanylin is endogenous or is administered exogenously. Guanylin is a GC-C receptor agonist as are uroguanylin, lymphoguanylin, renoguanylin, and E. coli heat stable ST peptide. A number of disorders can possibly be treated with GC-C receptor agonists. Because guanylin is a GC-C receptor agonist, these disorders can possibly be treated with guanylin or a biologically active variant or fragment thereof.

[0310] The inhibitors of the invention can be used alone or in combination therapy for the treatment or prevention of congestive heart failure and benign prostatic hyperplasia. Such agents can be used in combination with natriuretic peptides (e.g., atrial natriuretic peptide, brain natriuretic peptide or C-type natriuretic peptide), a diuretic, or an inhibitor of angiotensin converting enzyme.

[0311] The inhibitors of the invention can be used alone or in combination therapy for the treatment or prevention of obesity-related disorders (e.g. disorders that are associated with, caused by, or result from obesity). Examples of obesity-related disorders include overeating and bulimia, hypertension, diabetes, elevated plasma insulin concentrations and insulin resistance, dyslipidemias, hyperlipidemia, endometrial, breast, prostate and colon cancer, osteoarthritis, obstructive sleep apnea, cholelithiasis, gallstones, heart disease, abnormal heart rhythms and arrhythmias, myocardial infarction, congestive heart failure, coronary heart disease, sudden death, stroke, polycystic ovarian disease, craniopharyngioma, the Prader-Willi Syndrome, Frohlich's syndrome, GH-deficient subjects, normal variant short stature, Tumer's syndrome, and other pathological conditions showing reduced metabolic activity or a decrease in resting energy expenditure as a percentage of total fat-free mass, e.g., children with acute lymphoblastic leukemia. The compounds of the invention may be used to reduce or control body weight (or fat) or to prevent and/or treat obesity or other appetite related disorders related to the excess consumption of food, ethanol and other appetizing substances. The compounds may be used to modulate lipid metabolism, reduce body fat (e.g. via increasing fat utilization) or reduce (or suppress) appetite (e.g. via inducing satiety). Further examples of obesity-related disorders are metabolic syndrome, also known as syndrome X, insulin resistance syndrome, sexual and reproductive dysfunction, such as infertility, hypogonadism in males and hirsutism in females, gastrointestinal motility disorders, such as obesity-related gastroesophageal reflux, respiratory disorders, such as obesity-hypoventilation syndrome (Pickwickian syndrome), cardiovascular disorders, inflammation, such as systemic inflammation of the vasculature, arteriosclerosis, hypercholesterolemia, hyperuricaemia, lower back pain, gallbladder disease, gout, and kidney cancer. The agents of the present invention are also useful for reducing the risk of secondary outcomes of obesity, such as reducing the risk of left ventricular hypertrophy.

[0312] The inhibitors of the invention can be used alone or in combination therapy for the treatment or prevention of gastrointestinal related disorders including: chronic intestinal pseudo-obstruction (Ogilvie's syndrome), colonic pseudoobstruction, Crohn's disease, dyspepsia (including functional dyspepsia or nonulcer dyspepsia), functional bowel disorder, functional gastrointestinal disorders, functional heartburn, gastroesophageal reflux disease (GERD), gastrointestinal motility disorders, gastroparesis (e.g. idopathic gastroparesis), hypertrophic pyloric stenosis, Inflammatory bowel disease, irritable bowel syndrome (IBS), post-operative ileus, and ulcerative colitis. The inhibitors of the invention can be used alone or in combination therapy to patient suffering from or susceptible to GI disorders relating to damage to the GI tract stemming from impact or surgical intervention. The inhibitors of the invention can be used alone or in combination therapy to patients at risk for or having particular diseases are associated with hypomotility or stasis in the GI tract. For example, diabetic neuropathy, anorexia nervosa, and achlorhydria are frequently accompanied by gastric hypomotility. Damage to the GI tract following surgical intervention, for instance, can result in substantial gastric stasis. The inhibitors of the invention can be administered alone or in combination therapy to patients susceptible to or having a GI disorder associated with diabetes (e.g. diabetic gastropathy). The inhibitors of the invention can be used alone or in combination therapy to prevent and/or treat GI disorders characterized by at least one of nausea, vomiting, heartburn, postprandial discomfort, diarrhea, constipation, indigestion or related symptoms. The inhibitors of the invention can be used alone or in combination therapy to prevent and/or treat GI disorders associated with at least one of diabetes, anorexia nervosa, bulimia, achlorhydria, achalasia, anal fissure, irritable bowel syndrome, intestinal pseudoobstruction, scleroderma and gastrointestinal damage

[0313] The inhibitors can be used to prevent and/or treat constipation (e.g. constipation associated with use of a therapeutic agent; constipation associated with a neuropathic, metabolic or endocrine disorder (including autonomic neuropathy, Chagas disease, cystic fibrosis, diabetes mellitus, Hirschsprung disease, hyperthyroidism, hypocalcaemia, hypothyroidism, Multiple Sclerosis, neurofibromatosis, Parkinson's disease, and spinal cord lesions); post-surgical constipation (postoperative ileus); constipation associated with a gastrointestinal disorder; idiopathic constipation (functional constipation or slow transit constipation); constipation associated with the use of analgesic drugs (e.g. opioid induced constipation); constipation associated with the use of other agents (e.g. antihypertensives, anticonvulsants, antidepressants, antispasmodics and antipsychotics); megacolon; and chronic constipation).

[0314] The inhibitors can be used to prevent and/or treat gastrointestinal immotility, or other conditions calling for laxative or stool softener therapy. Gastrointestinal immotility can include constipation, and also includes delayed oral cecal transit time, irregular Taxation, and other related gastrointestinal motility disfunction including impaction. Impaction is a condition where a large mass of dry, hard stool develops in the rectum, often due to chronic constipation. This mass may be so hard that it cannot be excreted. The subjects affected byconstipation or gastrointestinal immotility can be refractory to laxative therapy and/or stool softener therapy.

[0315] The agents of the invention can be used for the treatment or prevention of cancer, pre-cancerous growths, or metastatic growths. For example, they can be used for the prevention or treatment of: colorectal/local metastasized colorectal cancer, gastrointestinal tract cancer, lung cancer, cancer or pre-cancerous growths or metastatic growths of epithelial cells, polyps, breast, colorectal, lung, ovarian, pancreatic, prostatic, renal, stomach, bladder, liver, esophageal and testicular carcinoma, carcinoma (e.g., basal cell, basosquamous, Brown-Pearce, ductal carcinoma, Ehrlich tumor, Krebs, Merkel cell, small or non-small cell lung, oat cell, papillary, bronchiolar, squamous cell, transitional cell, Walker), leukemia (e.g., B-cell, T-cell, HTLV, acute or chronic lymphocytic, mast cell, myeloid), histiocytonia, histiocytosis, Hodgkin's disease, non-Hodgkin's lymphoma, plasmacytoma, reticuloendotheliosis, adenoma, adeno-carcinoma, adenofibroma, adenolymphoma, ameloblastoma, angiokeratoma, angiolymphoid hyperplasia with eosinophilia, sclerosing angioma, angiomatosis, apudoma, branchionia, malignant carcinoid syndrome, carcinoid heart disease, carcinosarcoma, cementoma, cholangioma, cholesteatoma, chondrosarcoma, chondroblastoma, chondrosarcoma, chordoma, choristoma, craniopharyngioma, chrondroma, cylindroma, cystadenocarcinoma, cystadenoma, cystosarconia phyllodes, dysgenninoma, ependymoma, Ewing sarcoma, fibroma, fibrosarcoma, giant cell tumor, ganglioneuroma, glioblastoma, glomangioma, granulosa cell tumor, gynandroblastoma, hamartoma, hemangioendothelioma, hemangioma, hemangio-pericytoma, hemangiosarcoma, hepatoma, islet cell tumor, Kaposi sarcoma, leiomyoma, leiomyosarcoma, leukosarcoma, Leydig cell tumor, lipoma, liposarcoma, lymphaugioma, lymphangiomyoma, lymphangiosarcoma, medulloblastoma, meningioma, mesenchymoma, mesonephroma, mesothelioma, myoblastoma, myoma, myosarcoma, myxoma, myxosarcoma, neurilemmoma, neuroma, neuroblastoma, neuroepithelioma, neurofibroma, neurofibromatosis, odontoma, osteoma, osteosarcoma, papilloma, paraganglioma, paraganglionia. nonchroinaffin, pinealoma, rhabdomyoma, rhabdomyosarcoma, Sertoli cell tumor, teratoma, theca cell tumor, and other diseases in which cells have become dysplastic, immortalized, or transformed.

[0316] The inhibitors of the invention can be used for the treatment or prevention of: Familial Adenomatous Polyposis (FAP) (autosomal dominant syndrome) that precedes colon cancer, hereditary nonpolyposis colorectal cancer (HNPCC), and inherited autosomal dominant syndrome.

[0317] For treatment or prevention of cancer, pre-cancerous growths and metastatic growths, the inhibitors can be used in combination therapy with radiation or chemotherapeutic agents, an inhibitor of a cGMP-dependent phosphodiesterase or a selective cyclooxygenase-2 inhibitor. (a number of selective cyclooxygenase-2 inhibitors are described in WO02062369, hereby incorporated by reference).

[0318] The inhibitors can be for treatment or prevention of inflammation. Thus, they can be used alone or in combination with inhibitor of cGMP-dependent phosphodiesterase or a selective cyclooxygenase-2 inhibitor for treatment of: organ inflammation, IBD (e.g, Crohn's disease, ulcerative colitis), asthma, nephritis, hepatitis, pancreatitis, bronchitis, cystic fibrosis, ischemic bowel diseases, intestinal inflammations/allergies, coeliac disease, proctitis, eosnophilic gastroenteritis, mastocytosis, and other inflammatory disorders.

[0319] The inhibitors can also be used to treat or prevent insulin-related disorders, for example: II diabetes mellitus, hyperglycemia, obesity, disorders associated with disturbances in glucose or electrolyte transport and insulin secretion in cells, or endocrine disorders. They can be also used in insulin resistance treatment and post-surgical and non-post surgery decrease in insulin responsiveness.

[0320] The inhibitors can be used to prevent and/or treat pulmonary and respiratory related disorders, including, inhalation, ventilation and mucus secretion disorders, pulmonary hypertension, chronic obstruction of vessels and airways, and irreversible obstructions of vessels and bronchi. One may administer an agent of the invention for treating bronchospasm, for inducing bronchodilation, for treating chronic obstructive pulmonary disease (including chronic bronchitis with normal airflow), for treating asthma (including bronchial asthma, intrinsic asthma, extrinsic asthma, chronic or inveterate asthma (e.g. late asthma and airways hyper-responsiveness), dust-induced asthma, allergen-induced asthma, viral-induced asthma, cold-induced asthma, pollution-induced asthma and exercise-induced asthma) and for treating rhinitis (including acute, allergic, hatrophic rhinitis or chronic rhinitis (such as rhinitis caseosa, hypertrophic rhinitis, rhinitis purulenta, rhinitis sicca), rhinitis medicamentosa, membranous rhinitis (including croupous, fibrinous and pseudomembranous rhinitis), scrofulous rhinitis, perennial allergic rhinitis, seasonal rhinitis (including rhinitis nervosa (hay fever) and vasomotor rhinitis). This invention may also be useful in the treatment of dry eye disease and chronic sinusitis. The agents of the invention may also be used to prevent and/or treat disorders characterized by acute pulmonary vasoconstriction such as may result from pneumonia, traumatic injury, aspiration or inhalation injury, fat embolism in the lung, acidosis inflammation of the lung, adult respiratory distress syndrome, acute pulmonary edema, acute mountain sickness, post-cardiac surgery, acute pulmonary hypertension, persistent pulmonary hypertension of the newborn, perinatal aspiration syndrome, hyaline membrane disease, acute pulmonary thromboembolism, herapin-protamine reactions, sepsis, status asthmaticus or hypoxia (including iatrogenic hypoxia) and other forms of reversible pulmonary vasoconstriction. Such pulmonary disorders also are also characterized by inflammation of the lung including those associated with the migration into the lung of nonresident cell types including the various leucocyte subclasses. Also included in the respiratory disorders contemplated are: bullous disease, cough, chronic cough associated with inflammation or iatrogenic induced, airway constriction, pigeon fancier's disease, eosinophilic bronchitis, asthmatic bronchitis, chronic bronchitis with airway obstruction (chronic obstructive bronchitis), eosinophilic lung disease, emphysema, farmer's lung, allergic eye diseases (including allergic conjunctivitis, vernal conjunctivitis, vernal keratoconjunctivitis, and giant papillary conjunctivitis), idiopathic pulmonary fibrosis, cystic fibrosis, diffuse pan bronchiolitis and other diseases which are characterized by inflammation of the lung and/or excess mucosal secretion. Other physiological events which are contemplated to be prevented, treated or controlled include platelet activation in the lung, chronic inflammatory diseases of the lung which result in interstitial fibrosis, such as interstitial lung diseases (ILD) (e.g., idiopathic pulmonary fibrosis, or ILD associated with rheumatoid arthritis, or other autoimmune conditions), chronic obstructive pulmonary disease (COPD)(such as irreversible COPD), chronic sinusitis, fibroid lung, hypersensitivity lung diseases, hypersensitivity pneumonitis, idiopathic interstitial pneumonia, nasal congestion, nasal polyposis, and otitis media.

[0321] The inhibitors can be used in combination therapy with a phosphodiesterase inhibitor. (examples of such inhibitors can be found in U.S. Pat. No. 6,333,354, hereby incorporated by reference).

[0322] The inhibitors can be used alone or in combitherapy to prevent or treat: retinopathy, nephropathy, diabetic angiopathy, and edema formation The inhibitors can be used alone or in combitherapy to prevent or treat neurological disorders, for example, headache, migraines, anxiety, stress, cognitive disorders, cerebral ischemia, brain trauma, movement disorders, aggression, psychosis, seizures, panic attacks, hysteria, sleep disorders, depression, schizoaffective disorders, sleep apnea, attention deficit syndromes, memory loss, dementia, memory and learning disorders as discussed in Moncada and Higgs 1995 FASEB J. 9:1319-1330; Severina 1998 Biochemistry 63:794; Lee et al. 2000 PNAS 97: 10763-10768; Hobbs 1997 TIPS 18:484-491; Murad 1994 Adv. Pharmacol. 26:1-335; and Denninger et al. 1999 Biochim. Biophys. Acta 1411:334-350 and narcolepsy. They may also be used as a sedative.

[0323] The inhibitors and detectably labeled inhibitors can be used as markers to identify, detect, stage, or diagnosis diseases and conditions of small intestine, including: Crohn's disease, colitis, inflammatory bowel disease, tumors, benign tumors, such as benign stromal tumors, adenoma, angioma, adenomatous (pedunculated and sessile) polyps, malignant, carcinoid tumors, endocrine cell tumors, lymphoma, adenocarcinoma, foregut, midgut, and hindgut carcinoma, gastroinstestinal stromal tumor (GIST), such as leiomyorna, cellular leiomyoma, leiomyoblastoma, and leiomyosarcoma, gastrointestinal autonomic nerve tumor, malabsorption syndromes, celiac diseases, diverticulosis, Meckel's diverticulum, colonic diverticula, megacolon, Hirschsprung's disease, irritable bowel syndrome, mesenteric ischemia, ischemic colitis, colorectal cancer, colonic polyposis, polyp syndrome, intestinal adenocarcinoma, Liddle syndrome, Brody myopathy, infantile convulsions, and choreoathetosis

[0324] The inhibitors can be used in combitherapy with a GC-C agonist (e.g. guanylin or a biologically active variant or fragment thereof) conjugated to another molecule (e.g., a diagnostic or therapeutic molecule) to target cells bearing the GC-C receptor, e.g., cystic fibrosis lesions and specific cells lining the intestinal tract. Thus, they can be used to target radioactive moieties or therapeutic moieties to the intestine to aid in imaging and diagnosing or treating colorectal/metastasized or local colorectal cancer and to deliver normal copies of the p53 tumor suppressor gene to the intestinal tract. The inhibitors can also be used to increase the number of GC-C molecules on the surface of a cell. In some embodiments the cell is a metastasized colorectal cancer cell. In one embodiment the inhibitor is used administered in combitherapy with a GC-C agonist which is therapeutically conjugated to a second agent. In certain embodiments, the second agent can be radioactive or radiostable. In certain embodiments the second agent can be selected from the group consisting of a compound that causes cell death, a compound that inhibits cell division, a compound that induces cell differentiation, a chemotherapeutic, a toxin and a radiosensitizing agent. In certain embodiments the second agent can be selected from the group consisting of: methotrexate, doxorubicin, daunorubicin, cytosinarabinoside, etoposide, 5-4 fluorouracil, melphalan, chlorambucil, cis-platin, vindesine, mitomycin, bleomycin, purothionin, macromomycin, 1,4-benzoquinone derivatives, trenimon, ricin, ricin A chain, Pseudomonas exotoxin, diphtheria toxin, Clostridium perfringens phospholipase C, bovine pancreatic ribonuclease, pokeweed antiviral protein, abrin, abrin A chain, cobra venom factor, gelonin, saporin, modeccin, viscumin, volkensin, nitroimidazole, metronidazole and misonidazole.

[0325] The inhibitors can be used alone or in combination therapy to prevent and/or treat inner ear disorders, e.g., to prevent and/or treat Meniere's disease, including symptoms of the disease such as vertigo, hearing loss, tinnitus, sensation of fullness in the ear, and to maintain fluid homeostasis in the inner ear.

[0326] The inhibitors can be used alone or in combination therapy to prevent and/or treat disorders associated with fluid and sodium retention, e.g., diseases of the electrolyte-water/electrolyte transport system within the kidney, gut and urogenital system, congestive heart failure, hypertension, hypotension, salt dependent forms of high blood pressure, hepatic edema, and liver cirrhosis. In addition they can be used to facilitate diuresis or control intestinal fluid. The inhibitors can also be used to treat disorders where there is abnormal proliferation of epithelial cells within the kidney (e.g. as in the case of renal cancer).

[0327] The inhibitors can be used alone or in combination therapy to prevent and/or treat kidney disease. “Kidney disease” includes renal failure (including acute renal failure), renal insufficiency, nephrotic edema, glomerulonephritis, pyelonephritis, kidney failure, chronic renal failure, nephritis, nephrosis, azotemia, uremia, immune renal disease, acute nephritic syndrome, rapidly progressive nephritic syndrome, nephrotic syndrome, Berger's Disease, chronic nephritic/proteinuric syndrome, tubulointerstital disease, nephrotoxic disorders, renal infarction, atheroembolic renal disease, renal cortical necrosis, malignant nephroangiosclerosis, renal vein thrombosis, renal tubular acidosis, renal glucosuria, nephrogenic diabetes insipidus, Bartter's Syndrome, Liddle's Syndrome, polycystic kidney disease, medullary cystic disease, medullary sponge kidney, hereditary nephritis, and nail-patella syndrome, along with any disease or disorder that relates to the renal system and related disorders, as well as symptoms indicative of, or related to, renal or kidney disease and related disorders.

[0328] The inhibitors can be used alone or in combination therapy to prevent or treat polycystic kidney disease. Polycystic kidney disease” “PKD” (also called “polycystic renal disease”) refers to a group of disorders characterized by a large number of cysts distributed throughout dramatically enlarged kidneys. The resultant cyst development leads to impairment of kidney function and can eventually cause kidney failure. “PKD” specifically includes autosomal dominant polycystic kidney disease (ADPKD) and recessive autosomal recessive polycystic kidney disease (ARPKD), in all stages of development, regardless of the underlying cause.

[0329] The inhibitors can be used alone or in combination therapy to prevent and/or treat disorders associated with bicarbonate secretion, e.g., Cystic Fibrosis.

[0330] The inhibitors can be used alone or in combination therapy to prevent and/or treat disorders associated with bile secretion. In addition, they can be used to facilitate or control chloride and bile fluid secretion in the gall bladder.

[0331] The inhibitors can be used alone or in combination therapy to prevent and/or treat disorders associated with liver cell regeneration. This may include administration of the inhibitors to liver transplant recipients and to patients with drug or alcohol induced-liver damage. Furthermore, the inhibitors may be useful to treat liver damage as in the case of viral mediated hepatitis. The inhibitors may be used alone or in combination to prevent and/or treat liver abscess, liver cancer (either primary or metastatic), cirrhosis (such as cirrhosis caused by the alcohol consumption or primary biliary cirrhosis), amebic liver abscess, autoimmune hepatitis, biliary atresia, coccidioidomycosis disseminated, δ agent (hepatitis δ), hemochromatosis, hepatitis a, hepatitis b, hepatitis c, or any other acute, subacute, fulminant or chronic hepatitis of viral, metabolic or toxic etiology, hepatocellular carcinoma, pyogenic liver abscess, Reye's syndrome, sclerosing cholangitis, Wilson's disease, drug induced hepatotoxicity, or fulminant or acute liver failure. The inhibitors may be used in stimulating hepatic regeneration after surgical hepatectomy.

[0332] The inhibitors can be used alone or in combination therapy to prevent and/or treat myocardial infraction, diastolic dysfunction, angina pectoris, stable, unstable and variant (Prinzmetal) angina, atherosclerosis, thrombosis, endothelial dysfunction, cardiac edema, stroke, conditions of reduced blood vessel patency, e.g., postpercutaneous transluminal coronary angioplasty (post-PTCA) and peripheral vascular disease,

[0333] The inhibitors can be used alone or in combination therapy to prevent and/or treat glaucoma.

[0334] The inhibitors can be used alone or in combination therapy to prevent and/or treat immunodeficiency.

[0335] The inhibitors can be used alone or in combination therapy to prevent and/or treat bladder outlet obstruction and incontinence.

[0336] The inhibitors can be used alone or in combination therapy to prevent and/or treat male (e.g. erectile dysfunction) or female sexual dysfunction, premature labor, and dysmenorrhoea.

[0337] The inhibitors can be used alone or in combination therapy to prevent and/or treat osteopenia disorders (bone loss disorders). “Bone loss disorders” include conditions and diseases wherein the inhibition of bone loss and/or the promotion of bone formation is desirable. Among such conditions and diseases are osteoporosis, osteomyelitis, Paget's disease (osteitis deformans), periodontitis, hypercalcemia, osteonecrosis, osteosarcoma, osteolyic metastases, familial expansile osteolysis, prosthetic loosening, periprostetic osteolysis, bone loss attendant rheumatoid arthritis, and cleiodocranial dysplasia (CCD). Osteoporosis includes primary osteoporosis, endocrine osteoporosis (hyperthyroidism, hyperparathyroidism, Cushing's syndrome, and acromegaly), hereditary and congenital forms of osteoporosis (osteogenesis imperfecta, homocystinuria, Menkes' syndrome, and Rile-Day syndrome) and osteoporosis due to immobilization of extremitiesosteomyelitis, or an infectious lesion in bone leading to bone loss. The inhibitors can be used alone or in combination therapy to stimulating bone regeneration. The bone regeneration may be following reconstruction of bone defects in cranio-maxillofacial surgery, or following an implant into bone, for example a dental implant, bone supporting implant, or prosthesis. The bone regeneration may also be following a bone fracture.

### OTHER EMBODIMENTS

### HIV Protease Inhibitors and Reduction in Guanylin Activity

[0338] Diarrhea is a common complication in HIV patients. It appears that diarrhea is particularly common in patients treated with protease inhibitors. Prolonged diarrhea impacts quality of life and can contribute to weight loss, malnutrition, immunosuppression, poor drug absorption, non-compliance with therapy and mortality. Certain HIV protease inhibitors also inhibit chymotrypsin. Thus, treatment with HIV protease inhibitors may reduce chymotrypsin activity in the gastrointestinal tract and this may lead to increased levels of active guanylin. Since guanylin promotes intestinal motility, this increase in active guanylin can lead to diarrhea and other gastrointestinal disorders. Thus, the invention features methods for treating or preventing diarrhea and/or other gastrointestinal disorders in patients, particularly HIV patients and others being treated with a protease inhibitor that inhibits chymotrypsin, by administering to the patient chymotrypsin. The administered chymotrypsin should reduce the level of guanylin.

[0339] The gastrointestinal side-effects of HIV protease inhibitors can be mitigated by modifying the inhibitors to have reduced chymotrypsin inhibition activity. Thus, the invention features a method for identifying protease inhibitors, e.g., HIV protease inhibitors, having reduced chymotrypsin inhibition activity and thus reduced gastrointestinal side effects. The methods entail testing a known or candidate protease inhibitor for its ability to inhibit chymotrypsin and selecting a known or candidate protease inhibitor having reduced chymotrypsin inhibition and retaining the ability to inhibit HIV protease. The ability of a compound to inhibit HIV protease and the ability of a compound to inhibit chymotrypsin can be assessed using standard in vitro assays including the guanylin degradation assay described herein.

[0340] The invention also feature compounds that are analogues of an HIV protease inhibitor and have reduced chymotrypsin inhibition activity while retaining the ability to inhibit HIV protease.

[0341] As noted above, certain HIV protease inhibitors may inhibit chymotrypsin and may undesirably potentiate the activity of guanylin. Among these inhibitors are: ritonavir (André et al. 1998 Proc Natl Acad Sci USA 95:13120-4 and Schmidtke et al. 1999 J Biol Chem 274:35734-40), saquinavir (Hosseini et al. 2001 J Neuroimmunol. 118:233-44) and indinavir/indavir (Piccinini et al. 2002 AIDS 16:693-700). These HIV protease inhibitors and others have the ability to inhibit chymotrypsin and this may lead to gastrointestinal side-effects. To reduce these side-effects, a patient being treated with such an inhibitor can also be treated with uroguanylin or guanylin or an analogue or variant of uroguanylin or guanylin.

[0342] An HIV protease inhibitor variant having reduced chymotrypsin inhibition will be less likely to potentiate the action of guanylin. Thus, such inhibitors are less likely to be associated with gastrointestinal side-effects. HIV protease inhibitors such as those depicted below can be modified to reduce chymotrypsin inhibition. The modification can include replacing a hydroxyl group with a phosphonate group or with an ester (e.g., cycloalkyllester, arylalkylester, aralkylester, heteroaralkylester). Thus, any hydroxyl group in the compounds below can be replaced by —OR wherein R is a C₁ to C₁₂ alkyl group or a C₆-C₁₈ where alkyl refers to a hydrocarbon chain that may be a straight chain or branched chain, containing the indicated number of carbon atoms. For example, C₁-C₁₂ alkyl indicates that the group may have from 1 to 12 (inclusive) carbon atoms in it (i.e., 1, 2, 3, 4, 5, 6, 7, 8, 9, 10, 11, 12). The terms “arylalkyl” or “aralkyl” refer to an alkyl moiety in which an alkyl hydrogen atom is replaced by an aryl group. Examples of “arylalkyl” or “aralkyl” include benzyl and 9-fluorenyl groups. The term “aryl” refers to an aromatic monocyclic, bicyclic, or tricyclic hydrocarbon ring system, wherein any ring atom capable of substitution can be substituted by a substituent. Examples of aryl moieties include, but are not limited to, phenyl, naphthyl, and anthracenyl. The term “cycloalkyl” as employed herein includes saturated monocyclic, bicyclic, tricyclic, or polycyclic hydrocarbon groups having 3 to 12 carbons, wherein any ring atom capable of substitution can be substituted by a substituent. Examples of cycloalkyl moieties include, but are not limited to, cyclopentyl, norbomyl, and adamantyl. Saquinavir (CAS Registry No. 127779-20-8)

[chemical structure]

[0343] Indavir (CAS Registry No 150378-17-9)

[chemical structure]

[0344] Norvir (CAS Registry No. 155213-67-5)

[chemical structure]

[0345] Nelfinavir (CAS Registry No. 159989-64-7)

[chemical structure]

[0346] Amprinavir (CAS Registry No. 161814-49-9)

[chemical structure]

[0347] Atazanivir (CAS Registry No. 198904-31-3)

[chemical structure]

[0348] Lopinavir (CAS Registry No. 369372-47-4)

[chemical structure]

[0349] It has been suggested that the chymotrypsin like activity of the 20S proteasome is inhibited by HIV protease inhibitors. Thus, it can be desirable to assess chymotrypsin inhibitors and HIV protease inhibitors using an assay that measures the chymotrypsin-like activity of the proteasome. One such assay is described by Elliott et al. (Methods in Molecular Medicine 85:163-172, 2003). This assay can be used to accurately determine the level of proteasome activity in rodent blood samples. The assay entails measuring proteasome activity at either or both of the two proteolytic sites (chymotryptic and tryptic) within the 20S core of the proteasome and determining degree of inhibition conferred by a test agent.

The application's sequence listing, which the Patent Office published only in electronic form, follows.

SEQUENCE LISTING (4733 sequences)

SEQ ID NO: 1 - protein, 16 aa, Artificial Sequence
  Synthetically generated peptide
  VARIANT 1: Xaa = Ser, Asn, Tyr, Ala, Gln, Pro, Lys, Gly, or Thr, or is missing
  VARIANT 2: Xaa =  His, Asp, Glu, Ala, Ser, Asn, Gly, or is missing
  VARIANT 3: Xaa = Thr, Asp, Ser, Glu, Pro, Val or Leu
  VARIANT 5: Xaa = Asp, Ile or Glu
  VARIANT 6: Xaa = Ile, Trp or Leu
  VARIANT 7: Xaa = Cys, Ser, or Tyr
  VARIANT 8: Xaa = Ala, Val, Thr, Ile, Met or is missing
  VARIANT 9: Xaa = any amino acid; or Phe, Tyr, Asn, Trp; or an amino acid other than Phe, Trp, or Tyr; or non-aromatic amino acid ; or is missing
  VARIANT 10: Xaa = Ala, Val, Met, Thr or Ile
  VARIANT 11: Xaa = Ala or Val
  VARIANT 13: Xaa = Ala or Thr
  VARIANT 14: Xaa = Gly, Ala or Ser
  VARIANT 15: Xaa = Cys, Tyr or is missing
  VARIANT 16: Xaa = Trp, Tyr or Phe ; or Lys or Arg ; or is missing ; or His,  Leu or Ser
XXXCXXXXXXXCXXXX

SEQ ID NO: 2 - protein, 491 aa, Homo sapiens
MALLWGLLVLSWSCLQGPCSVFSPVSAMEPLGRQLTSGPNQEQVSPLTLLKLGNQEPGGQTALKSPPGVCSRDPTPEQTHRLARAMMAFTADLFSLVAQTSTCPNLILSPLSVALALSHLALGAQNHTLQRLQQVLHAGSGPCLPHLLSRLCQDLGPGAFRLAARMYLQKGFPIKEDFLEQSEQLFGAKPVSLTGKQEDDLANINQWVKEATEGKIQEFLSGLPEDTVLLLLNAIHFQGFWRNKFDPSLTQRDSFHLDEQFTVPVEMMQARTYPLRWFLLEQPEIQVAHFPFKNNMSFVVLVPTHFEWNVSQVLANLSWDTLHPPLVWERPTKVRLPKLYLKHQMDLVATLSQLGLQELFQAPDLRGISEQSLVVSGVQHQSTLELSEVGVEAAAATSIAMSRMSLSSFSVNRPFLFFIFEDTTGLPLFVGSVRNPNPSAPRELKEQQDSPGNKDFLQSLKGFPRGDKLFGPDLKLVPPMEEDYPQFGSPK

SEQ ID NO: 3 - protein, 29 aa, Hirudinaria manillensis
  VARIANT 23: Xaa = any amino acid
VDEKAEVTDGLCGDWTCSGAQVXQNDAAV

SEQ ID NO: 4 - protein, 55 aa, Hirudo medicinalis
TQGNTCGGETCSAAQVCLKGKCVCNEVHCRIRCKYGLKKDENGCEYPCSCAKASQ

SEQ ID NO: 5 - protein, 70 aa, Hirudo medicinalis [sequence omitted]

SEQ ID NO: 6 - protein, 20 aa, Bombyx mori
DEPTTKPFCEQAFGDCGTPY

SEQ ID NO: 7 - protein, 20 aa, Bombyx mori
DKPTTEPFICEQRFGNCGTG

SEQ ID NO: 8 - protein, 66 aa, Unknown
  Synthetically generated peptide
ITYTDCTESGQNLCLCEGSNVCGKGNKCILGSQGKDNQCVTGEGTPKPQSHNQGDFEPIPEDAYDE

SEQ ID NO: 9 - protein, 20 aa, Artificial Sequence
  Hirudin variant
FPRPGGGGNGDFEEIPEEYL

SEQ ID NO: 10 - protein, 100 aa, Artificial Sequence
  Synthetically generated peptide
MKMSRLCLSVALLVLLGTLAASTPGCDTSNQAKAQRPDFCLEPPYTGPCKARIIRYFYNAKAGLCQTFVYGGCRAKRNNFKSAEDCMRTCGGAIGPWENL

SEQ ID NO: 11 - protein, 5 aa, Artificial Sequence
  Synthetically generated peptide
QHNPR

SEQ ID NO: 12 - protein, 6 aa, Artificial Sequence
  Synthetically generated peptide
VQHNPR

SEQ ID NO: 13 - protein, 7 aa, Artificial Sequence
  Synthetically generated peptide
VRQHNPR

SEQ ID NO: 14 - protein, 8 aa, Artificial Sequence
  Synthetically generated peptide
VRGQHNPR

SEQ ID NO: 15 - protein, 9 aa, Artificial Sequence
  Synthetically generated peptide
VRGPQHNPR

SEQ ID NO: 16 - protein, 10 aa, Artificial Sequence
  Synthetically generated peptide
VRGPRQHNPR

SEQ ID NO: 17 - protein, 11 aa, Artificial Sequence
  Synthetically generated peptide
VRGPRRQHNPR

SEQ ID NO: 18 - protein, 6 aa, Artificial Sequence
  Synthetically generated peptide
RQHNPR

SEQ ID NO: 19 - protein, 34 aa, Artificial Sequence
  Synthetically generated peptide
IKPEAPGEDASPEELNRYYASLRHYLNLVTRQRY

SEQ ID NO: 20 - protein, 16 aa, Homo Sapiens
PGTCGEICAYAACTGC

SEQ ID NO: 21 - protein, 15 aa, Artificial Sequence
  Synthetically generated peptide
GTCGEICAYAACTGC

SEQ ID NO: 22 - protein, 14 aa, Artificial Sequence
  Synthetically generated peptide
TCGEICAYAACTGC

SEQ ID NO: 23 - protein, 13 aa, Artificial Sequence
  Synthetically generated peptide
CGEICAYAACTGC

SEQ ID NO: 24 - protein, 12 aa, Artificial Sequence
  Synthetically generated peptide
CEICAYAACTGC

SEQ ID NO: 25 - protein, 12 aa, Artificial Sequence
  Synthetically generated peptide
CGICAYAACTGC

SEQ ID NO: 26 - protein, 12 aa, Artificial Sequence
  Synthetically generated peptide
CGECAYAACTGC

SEQ ID NO: 27 - protein, 12 aa, Artificial Sequence
  Synthetically generated peptide
CGEICYAACTGC

SEQ ID NO: 28 - protein, 12 aa, Artificial Sequence
  Synthetically generated peptide
CGEICAAACTGC

SEQ ID NO: 29 - protein, 12 aa, Artificial Sequence
  Synthetically generated peptide
CGEICAYACTGC

SEQ ID NO: 30 - protein, 12 aa, Artificial Sequence
  Synthetically generated peptide
CGEICAYACTGC

SEQ ID NO: 31 - protein, 12 aa, Artificial Sequence
  Synthetically generated peptide
CGEICAYAACGC

SEQ ID NO: 32 - protein, 12 aa, Artificial Sequence
  Synthetically generated peptide
CGEICAYAACTC

SEQ ID NO: 33 - protein, 13 aa, Artificial Sequence
  Synthetically generated peptide
TCEICAYAACTGC

SEQ ID NO: 34 - protein, 12 aa, Artificial Sequence
  Synthetically generated peptide
TCICAYAACTGC

SEQ ID NO: 35 - protein, 12 aa, Artificial Sequence
  Synthetically generated peptide
TCECAYAACTGC

SEQ ID NO: 36 - protein, 12 aa, Artificial Sequence
  Synthetically generated peptide
TCEICYAACTGC

SEQ ID NO: 37 - protein, 12 aa, Artificial Sequence
  Synthetically generated peptide
TCEICAAACTGC

SEQ ID NO: 38 - protein, 12 aa, Artificial Sequence
  Synthetically generated peptide
TCEICAYACTGC

SEQ ID NO: 39 - protein, 12 aa, Artificial Sequence
  Synthetically generated peptide
TCEICAYACTGC

SEQ ID NO: 40 - protein, 12 aa, Artificial Sequence
  Synthetically generated peptide
TCEICAYAACGC

SEQ ID NO: 41 - protein, 12 aa, Artificial Sequence
  Synthetically generated peptide
TCEICAYAACTC

SEQ ID NO: 42 - protein, 13 aa, Artificial Sequence
  Synthetically generated peptide
TCGICAYAACTGC

SEQ ID NO: 43 - protein, 12 aa, Artificial Sequence
  Synthetically generated peptide
TCGCAYAACTGC

SEQ ID NO: 44 - protein, 12 aa, Artificial Sequence
  Synthetically generated peptide
TCGICYAACTGC

SEQ ID NO: 45 - protein, 12 aa, Artificial Sequence
  Synthetically generated peptide
TCGICAAACTGC

SEQ ID NO: 46 - protein, 12 aa, Artificial Sequence
  Synthetically generated peptide
TCGICAYACTGC

SEQ ID NO: 47 - protein, 12 aa, Artificial Sequence
  Synthetically generated peptide
TCGICAYACTGC

SEQ ID NO: 48 - protein, 12 aa, Artificial Sequence
  Synthetically generated peptide
TCGICAYAACGC

SEQ ID NO: 49 - protein, 12 aa, Artificial Sequence
  Synthetically generated peptide
TCGICAYAACTC

SEQ ID NO: 50 - protein, 13 aa, Artificial Sequence
  Synthetically generated peptide
TCGECAYAACTGC

SEQ ID NO: 51 - protein, 12 aa, Artificial Sequence
  Synthetically generated peptide
TCGECYAACTGC

SEQ ID NO: 52 - protein, 12 aa, Artificial Sequence
  Synthetically generated peptide
TCGECAAACTGC

SEQ ID NO: 53 - protein, 12 aa, Artificial Sequence
  Synthetically generated peptide
TCGECAYACTGC

SEQ ID NO: 54 - protein, 12 aa, Artificial Sequence
  Synthetically generated peptide
TCGECAYACTGC

SEQ ID NO: 55 - protein, 12 aa, Artificial Sequence
  Synthetically generated peptide
TCGECAYAACGC

SEQ ID NO: 56 - protein, 12 aa, Artificial Sequence
  Synthetically generated peptide
TCGECAYAACTC

SEQ ID NO: 57 - protein, 13 aa, Artificial Sequence
  Synthetically generated peptide
TCGEICYAACTGC

SEQ ID NO: 58 - protein, 12 aa, Artificial Sequence
  Synthetically generated peptide
TCGEICAACTGC

SEQ ID NO: 59 - protein, 12 aa, Artificial Sequence
  Synthetically generated peptide
TCGEICYACTGC

SEQ ID NO: 60 - protein, 12 aa, Artificial Sequence
  Synthetically generated peptide
TCGEICYACTGC

SEQ ID NO: 61 - protein, 12 aa, Artificial Sequence
  Synthetically generated peptide
TCGEICYAACGC

SEQ ID NO: 62 - protein, 12 aa, Artificial Sequence
  Synthetically generated peptide
TCGEICYAACTC

SEQ ID NO: 63 - protein, 13 aa, Artificial Sequence
  Synthetically generated peptide
TCGEICAAACTGC

SEQ ID NO: 64 - protein, 12 aa, Artificial Sequence
  Synthetically generated peptide
TCGEICAACTGC

SEQ ID NO: 65 - protein, 12 aa, Artificial Sequence
  Synthetically generated peptide
TCGEICAACTGC

SEQ ID NO: 66 - protein, 12 aa, Artificial Sequence
  Synthetically generated peptide
TCGEICAAACGC

SEQ ID NO: 67 - protein, 12 aa, Artificial Sequence
  Synthetically generated peptide
TCGEICAAACTC

SEQ ID NO: 68 - protein, 13 aa, Artificial Sequence
  Synthetically generated peptide
TCGEICAYACTGC

SEQ ID NO: 69 - protein, 12 aa, Artificial Sequence
  Synthetically generated peptide
TCGEICAYCTGC

SEQ ID NO: 70 - protein, 12 aa, Artificial Sequence
  Synthetically generated peptide
TCGEICAYACGC

SEQ ID NO: 71 - protein, 12 aa, Artificial Sequence
  Synthetically generated peptide
TCGEICAYACTC

SEQ ID NO: 72 - protein, 13 aa, Artificial Sequence
  Synthetically generated peptide
TCGEICAYACTGC

SEQ ID NO: 73 - protein, 12 aa, Artificial Sequence
  Synthetically generated peptide
TCGEICAYACGC

SEQ ID NO: 74 - protein, 12 aa, Artificial Sequence
  Synthetically generated peptide
TCGEICAYACTC

SEQ ID NO: 75 - protein, 13 aa, Artificial Sequence
  Synthetically generated peptide
TCGEICAYAACGC

SEQ ID NO: 76 - protein, 12 aa, Artificial Sequence
  Synthetically generated peptide
TCGEICAYAACC

SEQ ID NO: 77 - protein, 13 aa, Artificial Sequence
  Synthetically generated peptide
TCGEICAYAACTC

SEQ ID NO: 78 - protein, 14 aa, Artificial Sequence
  Synthetically generated peptide
GCGEICAYAACTGC

SEQ ID NO: 79 - protein, 13 aa, Artificial Sequence
  Synthetically generated peptide
GCEICAYAACTGC

SEQ ID NO: 80 - protein, 12 aa, Artificial Sequence
  Synthetically generated peptide
GCICAYAACTGC

SEQ ID NO: 81 - protein, 12 aa, Artificial Sequence
  Synthetically generated peptide
GCECAYAACTGC

SEQ ID NO: 82 - protein, 12 aa, Artificial Sequence
  Synthetically generated peptide
GCEICYAACTGC

SEQ ID NO: 83 - protein, 12 aa, Artificial Sequence
  Synthetically generated peptide
GCEICAAACTGC

SEQ ID NO: 84 - protein, 12 aa, Artificial Sequence
  Synthetically generated peptide
GCEICAYACTGC

SEQ ID NO: 85 - protein, 12 aa, Artificial Sequence
  Synthetically generated peptide
GCEICAYACTGC

SEQ ID NO: 86 - protein, 12 aa, Artificial Sequence
  Synthetically generated peptide
GCEICAYAACGC

SEQ ID NO: 87 - protein, 12 aa, Artificial Sequence
  Synthetically generated peptide
GCEICAYAACTC

SEQ ID NO: 88 - protein, 13 aa, Artificial Sequence
  Synthetically generated peptide
GCGICAYAACTGC

SEQ ID NO: 89 - protein, 12 aa, Artificial Sequence
  Synthetically generated peptide
GCGCAYAACTGC

SEQ ID NO: 90 - protein, 12 aa, Artificial Sequence
  Synthetically generated peptide
GCGICYAACTGC

SEQ ID NO: 91 - protein, 12 aa, Artificial Sequence
  Synthetically generated peptide
GCGICAAACTGC

SEQ ID NO: 92 - protein, 12 aa, Artificial Sequence
  Synthetically generated peptide
GCGICAYACTGC

SEQ ID NO: 93 - protein, 12 aa, Artificial Sequence
  Synthetically generated peptide
GCGICAYACTGC

SEQ ID NO: 94 - protein, 12 aa, Artificial Sequence
  Synthetically generated peptide
GCGICAYAACGC

SEQ ID NO: 95 - protein, 12 aa, Artificial Sequence
  Synthetically generated peptide
GCGICAYAACTC

SEQ ID NO: 96 - protein, 13 aa, Artificial Sequence
  Synthetically generated peptide
GCGECAYAACTGC

SEQ ID NO: 97 - protein, 12 aa, Artificial Sequence
  Synthetically generated peptide
GCGECYAACTGC

SEQ ID NO: 98 - protein, 12 aa, Artificial Sequence
  Synthetically generated peptide
GCGECAAACTGC

SEQ ID NO: 99 - protein, 12 aa, Artificial Sequence
  Synthetically generated peptide
GCGECAYACTGC

SEQ ID NO: 100 - protein, 12 aa, Artificial Sequence
  Synthetically generated peptide
GCGECAYACTGC

SEQ ID NO: 101 - protein, 12 aa, Artificial Sequence
  Synthetically generated peptide
GCGECAYAACGC

SEQ ID NO: 102 - protein, 12 aa, Artificial Sequence
  Synthetically generated peptide
GCGECAYAACTC

SEQ ID NO: 103 - protein, 13 aa, Artificial Sequence
  Synthetically generated peptide
GCGEICYAACTGC

SEQ ID NO: 104 - protein, 12 aa, Artificial Sequence
  Synthetically generated peptide
GCGEICAACTGC

SEQ ID NO: 105 - protein, 12 aa, Artificial Sequence
  Synthetically generated peptide
GCGEICYACTGC

SEQ ID NO: 106 - protein, 12 aa, Artificial Sequence
  Synthetically generated peptide
GCGEICYACTGC

SEQ ID NO: 107 - protein, 12 aa, Artificial Sequence
  Synthetically generated peptide
GCGEICYAACGC

SEQ ID NO: 108 - protein, 12 aa, Artificial Sequence
  Synthetically generated peptide
GCGEICYAACTC

SEQ ID NO: 109 - protein, 13 aa, Artificial Sequence
  Synthetically generated peptide
GCGEICAAACTGC

SEQ ID NO: 110 - protein, 12 aa, Artificial Sequence
  Synthetically generated peptide
GCGEICAACTGC

SEQ ID NO: 111 - protein, 12 aa, Artificial Sequence
  Synthetically generated peptide
GCGEICAACTGC

SEQ ID NO: 112 - protein, 12 aa, Artificial Sequence
  Synthetically generated peptide
GCGEICAAACGC

SEQ ID NO: 113 - protein, 12 aa, Artificial Sequence
  Synthetically generated peptide
GCGEICAAACTC

SEQ ID NO: 114 - protein, 13 aa, Artificial Sequence
  Synthetically generated peptide
GCGEICAYACTGC

SEQ ID NO: 115 - protein, 12 aa, Artificial Sequence
  Synthetically generated peptide
GCGEICAYCTGC

SEQ ID NO: 116 - protein, 12 aa, Artificial Sequence
  Synthetically generated peptide
GCGEICAYACGC

SEQ ID NO: 117 - protein, 12 aa, Artificial Sequence
  Synthetically generated peptide
GCGEICAYACTC

SEQ ID NO: 118 - protein, 13 aa, Artificial Sequence
  Synthetically generated peptide
GCGEICAYACTGC

SEQ ID NO: 119 - protein, 12 aa, Artificial Sequence
  Synthetically generated peptide
GCGEICAYACGC

SEQ ID NO: 120 - protein, 12 aa, Artificial Sequence
  Synthetically generated peptide
GCGEICAYACTC

SEQ ID NO: 121 - protein, 13 aa, Artificial Sequence
  Synthetically generated peptide
GCGEICAYAACGC

SEQ ID NO: 122 - protein, 12 aa, Artificial Sequence
  Synthetically generated peptide
GCGEICAYAACC

SEQ ID NO: 123 - protein, 13 aa, Artificial Sequence
  Synthetically generated peptide
GCGEICAYAACTC

SEQ ID NO: 124 - protein, 14 aa, Artificial Sequence
  Synthetically generated peptide
GTCEICAYAACTGC

SEQ ID NO: 125 - protein, 13 aa, Artificial Sequence
  Synthetically generated peptide
GTCICAYAACTGC

SEQ ID NO: 126 - protein, 12 aa, Artificial Sequence
  Synthetically generated peptide
GTCCAYAACTGC

SEQ ID NO: 127 - protein, 12 aa, Artificial Sequence
  Synthetically generated peptide
GTCICYAACTGC

SEQ ID NO: 128 - protein, 12 aa, Artificial Sequence
  Synthetically generated peptide
GTCICAAACTGC

SEQ ID NO: 129 - protein, 12 aa, Artificial Sequence
  Synthetically generated peptide
GTCICAYACTGC

SEQ ID NO: 130 - protein, 12 aa, Artificial Sequence
  Synthetically generated peptide
GTCICAYACTGC

SEQ ID NO: 131 - protein, 12 aa, Artificial Sequence
  Synthetically generated peptide
GTCICAYAACGC

SEQ ID NO: 132 - protein, 12 aa, Artificial Sequence
  Synthetically generated peptide
GTCICAYAACTC

SEQ ID NO: 133 - protein, 13 aa, Artificial Sequence
  Synthetically generated peptide
GTCECAYAACTGC

SEQ ID NO: 134 - protein, 12 aa, Artificial Sequence
  Synthetically generated peptide
GTCECYAACTGC

SEQ ID NO: 135 - protein, 12 aa, Artificial Sequence
  Synthetically generated peptide
GTCECAAACTGC

SEQ ID NO: 136 - protein, 12 aa, Artificial Sequence
  Synthetically generated peptide
GTCECAYACTGC

SEQ ID NO: 137 - protein, 12 aa, Artificial Sequence
  Synthetically generated peptide
GTCECAYACTGC

SEQ ID NO: 138 - protein, 12 aa, Artificial Sequence
  Synthetically generated peptide
GTCECAYAACGC

SEQ ID NO: 139 - protein, 12 aa, Artificial Sequence
  Synthetically generated peptide
GTCECAYAACTC

SEQ ID NO: 140 - protein, 13 aa, Artificial Sequence
  Synthetically generated peptide
GTCEICYAACTGC

SEQ ID NO: 141 - protein, 12 aa, Artificial Sequence
  Synthetically generated peptide
GTCEICAACTGC

SEQ ID NO: 142 - protein, 12 aa, Artificial Sequence
  Synthetically generated peptide
GTCEICYACTGC

SEQ ID NO: 143 - protein, 12 aa, Artificial Sequence
  Synthetically generated peptide
GTCEICYACTGC

SEQ ID NO: 144 - protein, 12 aa, Artificial Sequence
  Synthetically generated peptide
GTCEICYAACGC

SEQ ID NO: 145 - protein, 12 aa, Artificial Sequence
  Synthetically generated peptide
GTCEICYAACTC

SEQ ID NO: 146 - protein, 13 aa, Artificial Sequence
  Synthetically generated peptide
GTCEICAAACTGC

SEQ ID NO: 147 - protein, 12 aa, Artificial Sequence
  Synthetically generated peptide
GTCEICAACTGC

SEQ ID NO: 148 - protein, 12 aa, Artificial Sequence
  Synthetically generated peptide
GTCEICAACTGC

SEQ ID NO: 149 - protein, 12 aa, Artificial Sequence
  Synthetically generated peptide
GTCEICAAACGC

SEQ ID NO: 150 - protein, 12 aa, Artificial Sequence
  Synthetically generated peptide
GTCEICAAACTC

SEQ ID NO: 151 - protein, 13 aa, Artificial Sequence
  Synthetically generated peptide
GTCEICAYACTGC

SEQ ID NO: 152 - protein, 12 aa, Artificial Sequence
  Synthetically generated peptide
GTCEICAYCTGC

SEQ ID NO: 153 - protein, 12 aa, Artificial Sequence
  Synthetically generated peptide
GTCEICAYACGC

SEQ ID NO: 154 - protein, 12 aa, Artificial Sequence
  Synthetically generated peptide
GTCEICAYACTC

SEQ ID NO: 155 - protein, 13 aa, Artificial Sequence
  Synthetically generated peptide
GTCEICAYACTGC

SEQ ID NO: 156 - protein, 12 aa, Artificial Sequence
  Synthetically generated peptide
GTCEICAYACGC

SEQ ID NO: 157 - protein, 12 aa, Artificial Sequence
  Synthetically generated peptide
GTCEICAYACTC

SEQ ID NO: 158 - protein, 13 aa, Artificial Sequence
  Synthetically generated peptide
GTCEICAYAACGC

SEQ ID NO: 159 - protein, 12 aa, Artificial Sequence
  Synthetically generated peptide
GTCEICAYAACC

SEQ ID NO: 160 - protein, 13 aa, Artificial Sequence
  Synthetically generated peptide
GTCEICAYAACTC

SEQ ID NO: 161 - protein, 14 aa, Artificial Sequence
  Synthetically generated peptide
GTCGICAYAACTGC

SEQ ID NO: 162 - protein, 13 aa, Artificial Sequence
  Synthetically generated peptide
GTCGCAYAACTGC

SEQ ID NO: 163 - protein, 12 aa, Artificial Sequence
  Synthetically generated peptide
GTCGCYAACTGC

SEQ ID NO: 164 - protein, 12 aa, Artificial Sequence
  Synthetically generated peptide
GTCGCAAACTGC

SEQ ID NO: 165 - protein, 12 aa, Artificial Sequence
  Synthetically generated peptide
GTCGCAYACTGC

SEQ ID NO: 166 - protein, 12 aa, Artificial Sequence
  Synthetically generated peptide
GTCGCAYACTGC

SEQ ID NO: 167 - protein, 12 aa, Artificial Sequence
  Synthetically generated peptide
GTCGCAYAACGC

SEQ ID NO: 168 - protein, 12 aa, Artificial Sequence
  Synthetically generated peptide
GTCGCAYAACTC

SEQ ID NO: 169 - protein, 13 aa, Artificial Sequence
  Synthetically generated peptide
GTCGICYAACTGC

SEQ ID NO: 170 - protein, 12 aa, Artificial Sequence
  Synthetically generated peptide
GTCGICAACTGC

SEQ ID NO: 171 - protein, 12 aa, Artificial Sequence
  Synthetically generated peptide
GTCGICYACTGC

SEQ ID NO: 172 - protein, 12 aa, Artificial Sequence
  Synthetically generated peptide
GTCGICYACTGC

SEQ ID NO: 173 - protein, 12 aa, Artificial Sequence
  Synthetically generated peptide
GTCGICYAACGC

SEQ ID NO: 174 - protein, 12 aa, Artificial Sequence
  Synthetically generated peptide
GTCGICYAACTC

SEQ ID NO: 175 - protein, 13 aa, Artificial Sequence
  Synthetically generated peptide
GTCGICAAACTGC

SEQ ID NO: 176 - protein, 12 aa, Artificial Sequence
  Synthetically generated peptide
GTCGICAACTGC

SEQ ID NO: 177 - protein, 12 aa, Artificial Sequence
  Synthetically generated peptide
GTCGICAACTGC

SEQ ID NO: 178 - protein, 12 aa, Artificial Sequence
  Synthetically generated peptide
GTCGICAAACGC

SEQ ID NO: 179 - protein, 12 aa, Artificial Sequence
  Synthetically generated peptide
GTCGICAAACTC

SEQ ID NO: 180 - protein, 13 aa, Artificial Sequence
  Synthetically generated peptide
GTCGICAYACTGC

SEQ ID NO: 181 - protein, 12 aa, Artificial Sequence
  Synthetically generated peptide
GTCGICAYCTGC

SEQ ID NO: 182 - protein, 12 aa, Artificial Sequence
  Synthetically generated peptide
GTCGICAYACGC

SEQ ID NO: 183 - protein, 12 aa, Artificial Sequence
  Synthetically generated peptide
GTCGICAYACTC

SEQ ID NO: 184 - protein, 13 aa, Artificial Sequence
  Synthetically generated peptide
GTCGICAYACTGC

SEQ ID NO: 185 - protein, 12 aa, Artificial Sequence
  Synthetically generated peptide
GTCGICAYACGC

SEQ ID NO: 186 - protein, 12 aa, Artificial Sequence
  Synthetically generated peptide
GTCGICAYACTC

SEQ ID NO: 187 - protein, 13 aa, Artificial Sequence
  Synthetically generated peptide
GTCGICAYAACGC

SEQ ID NO: 188 - protein, 12 aa, Artificial Sequence
  Synthetically generated peptide
GTCGICAYAACC

SEQ ID NO: 189 - protein, 13 aa, Artificial Sequence
  Synthetically generated peptide
GTCGICAYAACTC

SEQ ID NO: 190 - protein, 14 aa, Artificial Sequence
  Synthetically generated peptide
GTCGECAYAACTGC

SEQ ID NO: 191 - protein, 13 aa, Artificial Sequence
  Synthetically generated peptide
GTCGECYAACTGC

SEQ ID NO: 192 - protein, 12 aa, Artificial Sequence
  Synthetically generated peptide
GTCGECAACTGC

SEQ ID NO: 193 - protein, 12 aa, Artificial Sequence
  Synthetically generated peptide
GTCGECYACTGC

SEQ ID NO: 194 - protein, 12 aa, Artificial Sequence
  Synthetically generated peptide
GTCGECYACTGC

SEQ ID NO: 195 - protein, 12 aa, Artificial Sequence
  Synthetically generated peptide
GTCGECYAACGC

SEQ ID NO: 196 - protein, 12 aa, Artificial Sequence
  Synthetically generated peptide
GTCGECYAACTC

SEQ ID NO: 197 - protein, 13 aa, Artificial Sequence
  Synthetically generated peptide
GTCGECAAACTGC

SEQ ID NO: 198 - protein, 12 aa, Artificial Sequence
  Synthetically generated peptide
GTCGECAACTGC

SEQ ID NO: 199 - protein, 12 aa, Artificial Sequence
  Synthetically generated peptide
GTCGECAACTGC

SEQ ID NO: 200 - protein, 12 aa, Artificial Sequence
  Synthetically generated peptide
GTCGECAAACGC

SEQ ID NO: 201 - protein, 12 aa, Artificial Sequence
  Synthetically generated peptide
GTCGECAAACTC

SEQ ID NO: 202 - protein, 13 aa, Artificial Sequence
  Synthetically generated peptide
GTCGECAYACTGC

SEQ ID NO: 203 - protein, 12 aa, Artificial Sequence
  Synthetically generated peptide
GTCGECAYCTGC

SEQ ID NO: 204 - protein, 12 aa, Artificial Sequence
  Synthetically generated peptide
GTCGECAYACGC

SEQ ID NO: 205 - protein, 12 aa, Artificial Sequence
  Synthetically generated peptide
GTCGECAYACTC

SEQ ID NO: 206 - protein, 13 aa, Artificial Sequence
  Synthetically generated peptide
GTCGECAYACTGC

SEQ ID NO: 207 - protein, 12 aa, Artificial Sequence
  Synthetically generated peptide
GTCGECAYACGC

SEQ ID NO: 208 - protein, 12 aa, Artificial Sequence
  Synthetically generated peptide
GTCGECAYACTC

SEQ ID NO: 209 - protein, 13 aa, Artificial Sequence
  Synthetically generated peptide
GTCGECAYAACGC

SEQ ID NO: 210 - protein, 12 aa, Artificial Sequence
  Synthetically generated peptide
GTCGECAYAACC

SEQ ID NO: 211 - protein, 13 aa, Artificial Sequence
  Synthetically generated peptide
GTCGECAYAACTC

SEQ ID NO: 212 - protein, 14 aa, Artificial Sequence
  Synthetically generated peptide
GTCGEICYAACTGC

SEQ ID NO: 213 - protein, 13 aa, Artificial Sequence
  Synthetically generated peptide
GTCGEICAACTGC

SEQ ID NO: 214 - protein, 12 aa, Artificial Sequence
  Synthetically generated peptide
GTCGEICACTGC

SEQ ID NO: 215 - protein, 12 aa, Artificial Sequence
  Synthetically generated peptide
GTCGEICACTGC

SEQ ID NO: 216 - protein, 12 aa, Artificial Sequence
  Synthetically generated peptide
GTCGEICAACGC

SEQ ID NO: 217 - protein, 12 aa, Artificial Sequence
  Synthetically generated peptide
GTCGEICAACTC

SEQ ID NO: 218 - protein, 13 aa, Artificial Sequence
  Synthetically generated peptide
GTCGEICYACTGC

SEQ ID NO: 219 - protein, 12 aa, Artificial Sequence
  Synthetically generated peptide
GTCGEICYCTGC

SEQ ID NO: 220 - protein, 12 aa, Artificial Sequence
  Synthetically generated peptide
GTCGEICYACGC

SEQ ID NO: 221 - protein, 12 aa, Artificial Sequence
  Synthetically generated peptide
GTCGEICYACTC

SEQ ID NO: 222 - protein, 13 aa, Artificial Sequence
  Synthetically generated peptide
GTCGEICYACTGC

SEQ ID NO: 223 - protein, 12 aa, Artificial Sequence
  Synthetically generated peptide
GTCGEICYACGC

SEQ ID NO: 224 - protein, 12 aa, Artificial Sequence
  Synthetically generated peptide
GTCGEICYACTC

SEQ ID NO: 225 - protein, 13 aa, Artificial Sequence
  Synthetically generated peptide
GTCGEICYAACGC

SEQ ID NO: 226 - protein, 12 aa, Artificial Sequence
  Synthetically generated peptide
GTCGEICYAACC

SEQ ID NO: 227 - protein, 13 aa, Artificial Sequence
  Synthetically generated peptide
GTCGEICYAACTC

SEQ ID NO: 228 - protein, 14 aa, Artificial Sequence
  Synthetically generated peptide
GTCGEICAAACTGC

SEQ ID NO: 229 - protein, 13 aa, Artificial Sequence
  Synthetically generated peptide
GTCGEICAACTGC

SEQ ID NO: 230 - protein, 12 aa, Artificial Sequence
  Synthetically generated peptide
GTCGEICACTGC

SEQ ID NO: 231 - protein, 12 aa, Artificial Sequence
  Synthetically generated peptide
GTCGEICAACGC

SEQ ID NO: 232 - protein, 12 aa, Artificial Sequence
  Synthetically generated peptide
GTCGEICAACTC

SEQ ID NO: 233 - protein, 13 aa, Artificial Sequence
  Synthetically generated peptide
GTCGEICAACTGC

SEQ ID NO: 234 - protein, 12 aa, Artificial Sequence
  Synthetically generated peptide
GTCGEICAACGC

SEQ ID NO: 235 - protein, 12 aa, Artificial Sequence
  Synthetically generated peptide
GTCGEICAACTC

SEQ ID NO: 236 - protein, 13 aa, Artificial Sequence
  Synthetically generated peptide
GTCGEICAAACGC

SEQ ID NO: 237 - protein, 12 aa, Artificial Sequence
  Synthetically generated peptide
GTCGEICAAACC

SEQ ID NO: 238 - protein, 13 aa, Artificial Sequence
  Synthetically generated peptide
GTCGEICAAACTC

SEQ ID NO: 239 - protein, 14 aa, Artificial Sequence
  Synthetically generated peptide
GTCGEICAYACTGC

SEQ ID NO: 240 - protein, 13 aa, Artificial Sequence
  Synthetically generated peptide
GTCGEICAYCTGC

SEQ ID NO: 241 - protein, 12 aa, Artificial Sequence
  Synthetically generated peptide
GTCGEICAYCGC

SEQ ID NO: 242 - protein, 12 aa, Artificial Sequence
  Synthetically generated peptide
GTCGEICAYCTC

SEQ ID NO: 243 - protein, 13 aa, Artificial Sequence
  Synthetically generated peptide
GTCGEICAYACGC

SEQ ID NO: 244 - protein, 12 aa, Artificial Sequence
  Synthetically generated peptide
GTCGEICAYACC

SEQ ID NO: 245 - protein, 13 aa, Artificial Sequence
  Synthetically generated peptide
GTCGEICAYACTC

SEQ ID NO: 246 - protein, 14 aa, Artificial Sequence
  Synthetically generated peptide
GTCGEICAYACTGC

SEQ ID NO: 247 - protein, 13 aa, Artificial Sequence
  Synthetically generated peptide
GTCGEICAYACGC

SEQ ID NO: 248 - protein, 12 aa, Artificial Sequence
  Synthetically generated peptide
GTCGEICAYACC

SEQ ID NO: 249 - protein, 13 aa, Artificial Sequence
  Synthetically generated peptide
GTCGEICAYACTC

SEQ ID NO: 250 - protein, 14 aa, Artificial Sequence
  Synthetically generated peptide
GTCGEICAYAACGC

SEQ ID NO: 251 - protein, 13 aa, Artificial Sequence
  Synthetically generated peptide
GTCGEICAYAACC

SEQ ID NO: 252 - protein, 14 aa, Artificial Sequence
  Synthetically generated peptide
GTCGEICAYAACTC

SEQ ID NO: 253 - protein, 15 aa, Artificial Sequence
  Synthetically generated peptide
PTCGEICAYAACTGC

SEQ ID NO: 254 - protein, 14 aa, Artificial Sequence
  Synthetically generated peptide
PCGEICAYAACTGC

SEQ ID NO: 255 - protein, 13 aa, Artificial Sequence
  Synthetically generated peptide
PCEICAYAACTGC

SEQ ID NO: 256 - protein, 12 aa, Artificial Sequence
  Synthetically generated peptide
PCICAYAACTGC

SEQ ID NO: 257 - protein, 12 aa, Artificial Sequence
  Synthetically generated peptide
PCECAYAACTGC

SEQ ID NO: 258 - protein, 12 aa, Artificial Sequence
  Synthetically generated peptide
PCEICYAACTGC

SEQ ID NO: 259 - protein, 12 aa, Artificial Sequence
  Synthetically generated peptide
PCEICAAACTGC

SEQ ID NO: 260 - protein, 12 aa, Artificial Sequence
  Synthetically generated peptide
PCEICAYACTGC

SEQ ID NO: 261 - protein, 12 aa, Artificial Sequence
  Synthetically generated peptide
PCEICAYACTGC

SEQ ID NO: 262 - protein, 12 aa, Artificial Sequence
  Synthetically generated peptide
PCEICAYAACGC

SEQ ID NO: 263 - protein, 12 aa, Artificial Sequence
  Synthetically generated peptide
PCEICAYAACTC

SEQ ID NO: 264 - protein, 13 aa, Artificial Sequence
  Synthetically generated peptide
PCGICAYAACTGC

SEQ ID NO: 265 - protein, 12 aa, Artificial Sequence
  Synthetically generated peptide
PCGCAYAACTGC

SEQ ID NO: 266 - protein, 12 aa, Artificial Sequence
  Synthetically generated peptide
PCGICYAACTGC

SEQ ID NO: 267 - protein, 12 aa, Artificial Sequence
  Synthetically generated peptide
PCGICAAACTGC

SEQ ID NO: 268 - protein, 12 aa, Artificial Sequence
  Synthetically generated peptide
PCGICAYACTGC

SEQ ID NO: 269 - protein, 12 aa, Artificial Sequence
  Synthetically generated peptide
PCGICAYACTGC

SEQ ID NO: 270 - protein, 12 aa, Artificial Sequence
  Synthetically generated peptide
PCGICAYAACGC

SEQ ID NO: 271 - protein, 12 aa, Artificial Sequence
  Synthetically generated peptide
PCGICAYAACTC

SEQ ID NO: 272 - protein, 13 aa, Artificial Sequence
  Synthetically generated peptide
PCGECAYAACTGC

SEQ ID NO: 273 - protein, 12 aa, Artificial Sequence
  Synthetically generated peptide
PCGECYAACTGC

SEQ ID NO: 274 - protein, 12 aa, Artificial Sequence
  Synthetically generated peptide
PCGECAAACTGC

SEQ ID NO: 275 - protein, 12 aa, Artificial Sequence
  Synthetically generated peptide
PCGECAYACTGC

SEQ ID NO: 276 - protein, 12 aa, Artificial Sequence
  Synthetically generated peptide
PCGECAYACTGC

SEQ ID NO: 277 - protein, 12 aa, Artificial Sequence
  Synthetically generated peptide
PCGECAYAACGC

SEQ ID NO: 278 - protein, 12 aa, Artificial Sequence
  Synthetically generated peptide
PCGECAYAACTC

SEQ ID NO: 279 - protein, 13 aa, Artificial Sequence
  Synthetically generated peptide
PCGEICYAACTGC

SEQ ID NO: 280 - protein, 12 aa, Artificial Sequence
  Synthetically generated peptide
PCGEICAACTGC

SEQ ID NO: 281 - protein, 12 aa, Artificial Sequence
  Synthetically generated peptide
PCGEICYACTGC

SEQ ID NO: 282 - protein, 12 aa, Artificial Sequence
  Synthetically generated peptide
PCGEICYACTGC

SEQ ID NO: 283 - protein, 12 aa, Artificial Sequence
  Synthetically generated peptide
PCGEICYAACGC

SEQ ID NO: 284 - protein, 12 aa, Artificial Sequence
  Synthetically generated peptide
PCGEICYAACTC

SEQ ID NO: 285 - protein, 13 aa, Artificial Sequence
  Synthetically generated peptide
PCGEICAAACTGC

SEQ ID NO: 286 - protein, 12 aa, Artificial Sequence
  Synthetically generated peptide
PCGEICAACTGC

SEQ ID NO: 287 - protein, 12 aa, Artificial Sequence
  Synthetically generated peptide
PCGEICAACTGC

SEQ ID NO: 288 - protein, 12 aa, Artificial Sequence
  Synthetically generated peptide
PCGEICAAACGC

SEQ ID NO: 289 - protein, 12 aa, Artificial Sequence
  Synthetically generated peptide
PCGEICAAACTC

SEQ ID NO: 290 - protein, 13 aa, Artificial Sequence
  Synthetically generated peptide
PCGEICAYACTGC

SEQ ID NO: 291 - protein, 12 aa, Artificial Sequence
  Synthetically generated peptide
PCGEICAYCTGC

SEQ ID NO: 292 - protein, 12 aa, Artificial Sequence
  Synthetically generated peptide
PCGEICAYACGC

SEQ ID NO: 293 - protein, 12 aa, Artificial Sequence
  Synthetically generated peptide
PCGEICAYACTC

SEQ ID NO: 294 - protein, 13 aa, Artificial Sequence
  Synthetically generated peptide
PCGEICAYACTGC

SEQ ID NO: 295 - protein, 12 aa, Artificial Sequence
  Synthetically generated peptide
PCGEICAYACGC

SEQ ID NO: 296 - protein, 12 aa, Artificial Sequence
  Synthetically generated peptide
PCGEICAYACTC

SEQ ID NO: 297 - protein, 13 aa, Artificial Sequence
  Synthetically generated peptide
PCGEICAYAACGC

SEQ ID NO: 298 - protein, 12 aa, Artificial Sequence
  Synthetically generated peptide
PCGEICAYAACC

SEQ ID NO: 299 - protein, 13 aa, Artificial Sequence
  Synthetically generated peptide
PCGEICAYAACTC

SEQ ID NO: 300 - protein, 14 aa, Artificial Sequence
  Synthetically generated peptide
PTCEICAYAACTGC

SEQ ID NO: 301 - protein, 13 aa, Artificial Sequence
  Synthetically generated peptide
PTCICAYAACTGC

SEQ ID NO: 302 - protein, 12 aa, Artificial Sequence
  Synthetically generated peptide
PTCCAYAACTGC

SEQ ID NO: 303 - protein, 12 aa, Artificial Sequence
  Synthetically generated peptide
PTCICYAACTGC

SEQ ID NO: 304 - protein, 12 aa, Artificial Sequence
  Synthetically generated peptide
PTCICAAACTGC

SEQ ID NO: 305 - protein, 12 aa, Artificial Sequence
  Synthetically generated peptide
PTCICAYACTGC

SEQ ID NO: 306 - protein, 12 aa, Artificial Sequence
  Synthetically generated peptide
PTCICAYACTGC

SEQ ID NO: 307 - protein, 12 aa, Artificial Sequence
  Synthetically generated peptide
PTCICAYAACGC

SEQ ID NO: 308 - protein, 12 aa, Artificial Sequence
  Synthetically generated peptide
PTCICAYAACTC

SEQ ID NO: 309 - protein, 13 aa, Artificial Sequence
  Synthetically generated peptide
PTCECAYAACTGC

SEQ ID NO: 310 - protein, 12 aa, Artificial Sequence
  Synthetically generated peptide
PTCECYAACTGC

SEQ ID NO: 311 - protein, 12 aa, Artificial Sequence
  Synthetically generated peptide
PTCECAAACTGC

SEQ ID NO: 312 - protein, 12 aa, Artificial Sequence
  Synthetically generated peptide
PTCECAYACTGC

SEQ ID NO: 313 - protein, 12 aa, Artificial Sequence
  Synthetically generated peptide
PTCECAYACTGC

SEQ ID NO: 314 - protein, 12 aa, Artificial Sequence
  Synthetically generated peptide
PTCECAYAACGC

SEQ ID NO: 315 - protein, 12 aa, Artificial Sequence
  Synthetically generated peptide
PTCECAYAACTC

SEQ ID NO: 316 - protein, 13 aa, Artificial Sequence
  Synthetically generated peptide
PTCEICYAACTGC

SEQ ID NO: 317 - protein, 12 aa, Artificial Sequence
  Synthetically generated peptide
PTCEICAACTGC

SEQ ID NO: 318 - protein, 12 aa, Artificial Sequence
  Synthetically generated peptide
PTCEICYACTGC

SEQ ID NO: 319 - protein, 12 aa, Artificial Sequence
  Synthetically generated peptide
PTCEICYACTGC

SEQ ID NO: 320 - protein, 12 aa, Artificial Sequence
  Synthetically generated peptide
PTCEICYAACGC

SEQ ID NO: 321 - protein, 12 aa, Artificial Sequence
  Synthetically generated peptide
PTCEICYAACTC

SEQ ID NO: 322 - protein, 13 aa, Artificial Sequence
  Synthetically generated peptide
PTCEICAAACTGC

SEQ ID NO: 323 - protein, 12 aa, Artificial Sequence
  Synthetically generated peptide
PTCEICAACTGC

SEQ ID NO: 324 - protein, 12 aa, Artificial Sequence
  Synthetically generated peptide
PTCEICAACTGC

SEQ ID NO: 325 - protein, 12 aa, Artificial Sequence
  Synthetically generated peptide
PTCEICAAACGC

SEQ ID NO: 326 - protein, 12 aa, Artificial Sequence
  Synthetically generated peptide
PTCEICAAACTC

SEQ ID NO: 327 - protein, 13 aa, Artificial Sequence
  Synthetically generated peptide
PTCEICAYACTGC

SEQ ID NO: 328 - protein, 12 aa, Artificial Sequence
  Synthetically generated peptide
PTCEICAYCTGC

SEQ ID NO: 329 - protein, 12 aa, Artificial Sequence
  Synthetically generated peptide
PTCEICAYACGC

SEQ ID NO: 330 - protein, 12 aa, Artificial Sequence
  Synthetically generated peptide
PTCEICAYACTC

SEQ ID NO: 331 - protein, 13 aa, Artificial Sequence
  Synthetically generated peptide
PTCEICAYACTGC

SEQ ID NO: 332 - protein, 12 aa, Artificial Sequence
  Synthetically generated peptide
PTCEICAYACGC

SEQ ID NO: 333 - protein, 12 aa, Artificial Sequence
  Synthetically generated peptide
PTCEICAYACTC

SEQ ID NO: 334 - protein, 13 aa, Artificial Sequence
  Synthetically generated peptide
PTCEICAYAACGC

SEQ ID NO: 335 - protein, 12 aa, Artificial Sequence
  Synthetically generated peptide
PTCEICAYAACC

SEQ ID NO: 336 - protein, 13 aa, Artificial Sequence
  Synthetically generated peptide
PTCEICAYAACTC

SEQ ID NO: 337 - protein, 14 aa, Artificial Sequence
  Synthetically generated peptide
PTCGICAYAACTGC

SEQ ID NO: 338 - protein, 13 aa, Artificial Sequence
  Synthetically generated peptide
PTCGCAYAACTGC

SEQ ID NO: 339 - protein, 12 aa, Artificial Sequence
  Synthetically generated peptide
PTCGCYAACTGC

SEQ ID NO: 340 - protein, 12 aa, Artificial Sequence
  Synthetically generated peptide
PTCGCAAACTGC

SEQ ID NO: 341 - protein, 12 aa, Artificial Sequence
  Synthetically generated peptide
PTCGCAYACTGC

SEQ ID NO: 342 - protein, 12 aa, Artificial Sequence
  Synthetically generated peptide
PTCGCAYACTGC

SEQ ID NO: 343 - protein, 12 aa, Artificial Sequence
  Synthetically generated peptide
PTCGCAYAACGC

SEQ ID NO: 344 - protein, 12 aa, Artificial Sequence
  Synthetically generated peptide
PTCGCAYAACTC

SEQ ID NO: 345 - protein, 13 aa, Artificial Sequence
  Synthetically generated peptide
PTCGICYAACTGC

SEQ ID NO: 346 - protein, 12 aa, Artificial Sequence
  Synthetically generated peptide
PTCGICAACTGC

SEQ ID NO: 347 - protein, 12 aa, Artificial Sequence
  Synthetically generated peptide
PTCGICYACTGC

SEQ ID NO: 348 - protein, 12 aa, Artificial Sequence
  Synthetically generated peptide
PTCGICYACTGC

SEQ ID NO: 349 - protein, 12 aa, Artificial Sequence
  Synthetically generated peptide
PTCGICYAACGC

SEQ ID NO: 350 - protein, 12 aa, Artificial Sequence
  Synthetically generated peptide
PTCGICYAACTC

SEQ ID NO: 351 - protein, 13 aa, Artificial Sequence
  Synthetically generated peptide
PTCGICAAACTGC

SEQ ID NO: 352 - protein, 12 aa, Artificial Sequence
  Synthetically generated peptide
PTCGICAACTGC

SEQ ID NO: 353 - protein, 12 aa, Artificial Sequence
  Synthetically generated peptide
PTCGICAACTGC

SEQ ID NO: 354 - protein, 12 aa, Artificial Sequence
  Synthetically generated peptide
PTCGICAAACGC

SEQ ID NO: 355 - protein, 12 aa, Artificial Sequence
  Synthetically generated peptide
PTCGICAAACTC

SEQ ID NO: 356 - protein, 13 aa, Artificial Sequence
  Synthetically generated peptide
PTCGICAYACTGC

SEQ ID NO: 357 - protein, 12 aa, Artificial Sequence
  Synthetically generated peptide
PTCGICAYCTGC

SEQ ID NO: 358 - protein, 12 aa, Artificial Sequence
  Synthetically generated peptide
PTCGICAYACGC

SEQ ID NO: 359 - protein, 12 aa, Artificial Sequence
  Synthetically generated peptide
PTCGICAYACTC

SEQ ID NO: 360 - protein, 13 aa, Artificial Sequence
  Synthetically generated peptide
PTCGICAYACTGC

SEQ ID NO: 361 - protein, 12 aa, Artificial Sequence
  Synthetically generated peptide
PTCGICAYACGC

SEQ ID NO: 362 - protein, 12 aa, Artificial Sequence
  Synthetically generated peptide
PTCGICAYACTC

SEQ ID NO: 363 - protein, 13 aa, Artificial Sequence
  Synthetically generated peptide
PTCGICAYAACGC

SEQ ID NO: 364 - protein, 12 aa, Artificial Sequence
  Synthetically generated peptide
PTCGICAYAACC

SEQ ID NO: 365 - protein, 13 aa, Artificial Sequence
  Synthetically generated peptide
PTCGICAYAACTC

SEQ ID NO: 366 - protein, 14 aa, Artificial Sequence
  Synthetically generated peptide
PTCGECAYAACTGC

SEQ ID NO: 367 - protein, 13 aa, Artificial Sequence
  Synthetically generated peptide
PTCGECYAACTGC

SEQ ID NO: 368 - protein, 12 aa, Artificial Sequence
  Synthetically generated peptide
PTCGECAACTGC

SEQ ID NO: 369 - protein, 12 aa, Artificial Sequence
  Synthetically generated peptide
PTCGECYACTGC

SEQ ID NO: 370 - protein, 12 aa, Artificial Sequence
  Synthetically generated peptide
PTCGECYACTGC

SEQ ID NO: 371 - protein, 12 aa, Artificial Sequence
  Synthetically generated peptide
PTCGECYAACGC

SEQ ID NO: 372 - protein, 12 aa, Artificial Sequence
  Synthetically generated peptide
PTCGECYAACTC

SEQ ID NO: 373 - protein, 13 aa, Artificial Sequence
  Synthetically generated peptide
PTCGECAAACTGC

SEQ ID NO: 374 - protein, 12 aa, Artificial Sequence
  Synthetically generated peptide
PTCGECAACTGC

SEQ ID NO: 375 - protein, 12 aa, Artificial Sequence
  Synthetically generated peptide
PTCGECAACTGC

SEQ ID NO: 376 - protein, 12 aa, Artificial Sequence
  Synthetically generated peptide
PTCGECAAACGC

SEQ ID NO: 377 - protein, 12 aa, Artificial Sequence
  Synthetically generated peptide
PTCGECAAACTC

SEQ ID NO: 378 - protein, 13 aa, Artificial Sequence
  Synthetically generated peptide
PTCGECAYACTGC

SEQ ID NO: 379 - protein, 12 aa, Artificial Sequence
  Synthetically generated peptide
PTCGECAYCTGC

SEQ ID NO: 380 - protein, 12 aa, Artificial Sequence
  Synthetically generated peptide
PTCGECAYACGC

SEQ ID NO: 381 - protein, 12 aa, Artificial Sequence
  Synthetically generated peptide
PTCGECAYACTC

SEQ ID NO: 382 - protein, 13 aa, Artificial Sequence
  Synthetically generated peptide
PTCGECAYACTGC

SEQ ID NO: 383 - protein, 12 aa, Artificial Sequence
  Synthetically generated peptide
PTCGECAYACGC

SEQ ID NO: 384 - protein, 12 aa, Artificial Sequence
  Synthetically generated peptide
PTCGECAYACTC

SEQ ID NO: 385 - protein, 13 aa, Artificial Sequence
  Synthetically generated peptide
PTCGECAYAACGC

SEQ ID NO: 386 - protein, 12 aa, Artificial Sequence
  Synthetically generated peptide
PTCGECAYAACC

SEQ ID NO: 387 - protein, 13 aa, Artificial Sequence
  Synthetically generated peptide
PTCGECAYAACTC

SEQ ID NO: 388 - protein, 14 aa, Artificial Sequence
  Synthetically generated peptide
PTCGEICYAACTGC

SEQ ID NO: 389 - protein, 13 aa, Artificial Sequence
  Synthetically generated peptide
PTCGEICAACTGC

SEQ ID NO: 390 - protein, 12 aa, Artificial Sequence
  Synthetically generated peptide
PTCGEICACTGC

SEQ ID NO: 391 - protein, 12 aa, Artificial Sequence
  Synthetically generated peptide
PTCGEICACTGC

SEQ ID NO: 392 - protein, 12 aa, Artificial Sequence
  Synthetically generated peptide
PTCGEICAACGC

SEQ ID NO: 393 - protein, 12 aa, Artificial Sequence
  Synthetically generated peptide
PTCGEICAACTC

SEQ ID NO: 394 - protein, 13 aa, Artificial Sequence
  Synthetically generated peptide
PTCGEICYACTGC

SEQ ID NO: 395 - protein, 12 aa, Artificial Sequence
  Synthetically generated peptide
PTCGEICYCTGC

SEQ ID NO: 396 - protein, 12 aa, Artificial Sequence
  Synthetically generated peptide
PTCGEICYACGC

SEQ ID NO: 397 - protein, 12 aa, Artificial Sequence
  Synthetically generated peptide
PTCGEICYACTC

SEQ ID NO: 398 - protein, 13 aa, Artificial Sequence
  Synthetically generated peptide
PTCGEICYACTGC

SEQ ID NO: 399 - protein, 12 aa, Artificial Sequence
  Synthetically generated peptide
PTCGEICYACGC

SEQ ID NO: 400 - protein, 12 aa, Artificial Sequence
  Synthetically generated peptide
PTCGEICYACTC

SEQ ID NO: 401 - protein, 13 aa, Artificial Sequence
  Synthetically generated peptide
PTCGEICYAACGC

SEQ ID NO: 402 - protein, 12 aa, Artificial Sequence
  Synthetically generated peptide
PTCGEICYAACC

SEQ ID NO: 403 - protein, 13 aa, Artificial Sequence
  Synthetically generated peptide
PTCGEICYAACTC

SEQ ID NO: 404 - protein, 14 aa, Artificial Sequence
  Synthetically generated peptide
PTCGEICAAACTGC

SEQ ID NO: 405 - protein, 13 aa, Artificial Sequence
  Synthetically generated peptide
PTCGEICAACTGC

SEQ ID NO: 406 - protein, 12 aa, Artificial Sequence
  Synthetically generated peptide
PTCGEICACTGC

SEQ ID NO: 407 - protein, 12 aa, Artificial Sequence
  Synthetically generated peptide
PTCGEICAACGC

SEQ ID NO: 408 - protein, 12 aa, Artificial Sequence
  Synthetically generated peptide
PTCGEICAACTC

SEQ ID NO: 409 - protein, 13 aa, Artificial Sequence
  Synthetically generated peptide
PTCGEICAACTGC

SEQ ID NO: 410 - protein, 12 aa, Artificial Sequence
  Synthetically generated peptide
PTCGEICAACGC

SEQ ID NO: 411 - protein, 12 aa, Artificial Sequence
  Synthetically generated peptide
PTCGEICAACTC

SEQ ID NO: 412 - protein, 13 aa, Artificial Sequence
  Synthetically generated peptide
PTCGEICAAACGC

SEQ ID NO: 413 - protein, 12 aa, Artificial Sequence
  Synthetically generated peptide
PTCGEICAAACC

SEQ ID NO: 414 - protein, 13 aa, Artificial Sequence
  Synthetically generated peptide
PTCGEICAAACTC

SEQ ID NO: 415 - protein, 14 aa, Artificial Sequence
  Synthetically generated peptide
PTCGEICAYACTGC

SEQ ID NO: 416 - protein, 13 aa, Artificial Sequence
  Synthetically generated peptide
PTCGEICAYCTGC

SEQ ID NO: 417 - protein, 12 aa, Artificial Sequence
  Synthetically generated peptide
PTCGEICAYCGC

SEQ ID NO: 418 - protein, 12 aa, Artificial Sequence
  Synthetically generated peptide
PTCGEICAYCTC

SEQ ID NO: 419 - protein, 13 aa, Artificial Sequence
  Synthetically generated peptide
PTCGEICAYACGC

SEQ ID NO: 420 - protein, 12 aa, Artificial Sequence
  Synthetically generated peptide
PTCGEICAYACC

SEQ ID NO: 421 - protein, 13 aa, Artificial Sequence
  Synthetically generated peptide
PTCGEICAYACTC

SEQ ID NO: 422 - protein, 14 aa, Artificial Sequence
  Synthetically generated peptide
PTCGEICAYACTGC

SEQ ID NO: 423 - protein, 13 aa, Artificial Sequence
  Synthetically generated peptide
PTCGEICAYACGC

SEQ ID NO: 424 - protein, 12 aa, Artificial Sequence
  Synthetically generated peptide
PTCGEICAYACC

SEQ ID NO: 425 - protein, 13 aa, Artificial Sequence
  Synthetically generated peptide
PTCGEICAYACTC

SEQ ID NO: 426 - protein, 14 aa, Artificial Sequence
  Synthetically generated peptide
PTCGEICAYAACGC

SEQ ID NO: 427 - protein, 13 aa, Artificial Sequence
  Synthetically generated peptide
PTCGEICAYAACC

SEQ ID NO: 428 - protein, 14 aa, Artificial Sequence
  Synthetically generated peptide
PTCGEICAYAACTC

SEQ ID NO: 429 - protein, 15 aa, Artificial Sequence
  Synthetically generated peptide
PGCGEICAYAACTGC

SEQ ID NO: 430 - protein, 14 aa, Artificial Sequence
  Synthetically generated peptide
PGCEICAYAACTGC

SEQ ID NO: 431 - protein, 13 aa, Artificial Sequence
  Synthetically generated peptide
PGCICAYAACTGC

SEQ ID NO: 432 - protein, 12 aa, Artificial Sequence
  Synthetically generated peptide
PGCCAYAACTGC

SEQ ID NO: 433 - protein, 12 aa, Artificial Sequence
  Synthetically generated peptide
PGCICYAACTGC

SEQ ID NO: 434 - protein, 12 aa, Artificial Sequence
  Synthetically generated peptide
PGCICAAACTGC

SEQ ID NO: 435 - protein, 12 aa, Artificial Sequence
  Synthetically generated peptide
PGCICAYACTGC

SEQ ID NO: 436 - protein, 12 aa, Artificial Sequence
  Synthetically generated peptide
PGCICAYACTGC

SEQ ID NO: 437 - protein, 12 aa, Artificial Sequence
  Synthetically generated peptide
PGCICAYAACGC

SEQ ID NO: 438 - protein, 12 aa, Artificial Sequence
  Synthetically generated peptide
PGCICAYAACTC

SEQ ID NO: 439 - protein, 13 aa, Artificial Sequence
  Synthetically generated peptide
PGCECAYAACTGC

SEQ ID NO: 440 - protein, 12 aa, Artificial Sequence
  Synthetically generated peptide
PGCECYAACTGC

SEQ ID NO: 441 - protein, 12 aa, Artificial Sequence
  Synthetically generated peptide
PGCECAAACTGC

SEQ ID NO: 442 - protein, 12 aa, Artificial Sequence
  Synthetically generated peptide
PGCECAYACTGC

SEQ ID NO: 443 - protein, 12 aa, Artificial Sequence
  Synthetically generated peptide
PGCECAYACTGC

SEQ ID NO: 444 - protein, 12 aa, Artificial Sequence
  Synthetically generated peptide
PGCECAYAACGC

SEQ ID NO: 445 - protein, 12 aa, Artificial Sequence
  Synthetically generated peptide
PGCECAYAACTC

SEQ ID NO: 446 - protein, 13 aa, Artificial Sequence
  Synthetically generated peptide
PGCEICYAACTGC

SEQ ID NO: 447 - protein, 12 aa, Artificial Sequence
  Synthetically generated peptide
PGCEICAACTGC

SEQ ID NO: 448 - protein, 12 aa, Artificial Sequence
  Synthetically generated peptide
PGCEICYACTGC

SEQ ID NO: 449 - protein, 12 aa, Artificial Sequence
  Synthetically generated peptide
PGCEICYACTGC

SEQ ID NO: 450 - protein, 12 aa, Artificial Sequence
  Synthetically generated peptide
PGCEICYAACGC

SEQ ID NO: 451 - protein, 12 aa, Artificial Sequence
  Synthetically generated peptide
PGCEICYAACTC

SEQ ID NO: 452 - protein, 13 aa, Artificial Sequence
  Synthetically generated peptide
PGCEICAAACTGC

SEQ ID NO: 453 - protein, 12 aa, Artificial Sequence
  Synthetically generated peptide
PGCEICAACTGC

SEQ ID NO: 454 - protein, 12 aa, Artificial Sequence
  Synthetically generated peptide
PGCEICAACTGC

SEQ ID NO: 455 - protein, 12 aa, Artificial Sequence
  Synthetically generated peptide
PGCEICAAACGC

SEQ ID NO: 456 - protein, 12 aa, Artificial Sequence
  Synthetically generated peptide
PGCEICAAACTC

SEQ ID NO: 457 - protein, 13 aa, Artificial Sequence
  Synthetically generated peptide
PGCEICAYACTGC

SEQ ID NO: 458 - protein, 12 aa, Artificial Sequence
  Synthetically generated peptide
PGCEICAYCTGC

SEQ ID NO: 459 - protein, 12 aa, Artificial Sequence
  Synthetically generated peptide
PGCEICAYACGC

SEQ ID NO: 460 - protein, 12 aa, Artificial Sequence
  Synthetically generated peptide
PGCEICAYACTC

SEQ ID NO: 461 - protein, 13 aa, Artificial Sequence
  Synthetically generated peptide
PGCEICAYACTGC

SEQ ID NO: 462 - protein, 12 aa, Artificial Sequence
  Synthetically generated peptide
PGCEICAYACGC

SEQ ID NO: 463 - protein, 12 aa, Artificial Sequence
  Synthetically generated peptide
PGCEICAYACTC

SEQ ID NO: 464 - protein, 13 aa, Artificial Sequence
  Synthetically generated peptide
PGCEICAYAACGC

SEQ ID NO: 465 - protein, 12 aa, Artificial Sequence
  Synthetically generated peptide
PGCEICAYAACC

SEQ ID NO: 466 - protein, 13 aa, Artificial Sequence
  Synthetically generated peptide
PGCEICAYAACTC

SEQ ID NO: 467 - protein, 14 aa, Artificial Sequence
  Synthetically generated peptide
PGCGICAYAACTGC

SEQ ID NO: 468 - protein, 13 aa, Artificial Sequence
  Synthetically generated peptide
PGCGCAYAACTGC

SEQ ID NO: 469 - protein, 12 aa, Artificial Sequence
  Synthetically generated peptide
PGCGCYAACTGC

SEQ ID NO: 470 - protein, 12 aa, Artificial Sequence
  Synthetically generated peptide
PGCGCAAACTGC

SEQ ID NO: 471 - protein, 12 aa, Artificial Sequence
  Synthetically generated peptide
PGCGCAYACTGC

SEQ ID NO: 472 - protein, 12 aa, Artificial Sequence
  Synthetically generated peptide
PGCGCAYACTGC

SEQ ID NO: 473 - protein, 12 aa, Artificial Sequence
  Synthetically generated peptide
PGCGCAYAACGC

SEQ ID NO: 474 - protein, 12 aa, Artificial Sequence
  Synthetically generated peptide
PGCGCAYAACTC

SEQ ID NO: 475 - protein, 13 aa, Artificial Sequence
  Synthetically generated peptide
PGCGICYAACTGC

SEQ ID NO: 476 - protein, 12 aa, Artificial Sequence
  Synthetically generated peptide
PGCGICAACTGC

SEQ ID NO: 477 - protein, 12 aa, Artificial Sequence
  Synthetically generated peptide
PGCGICYACTGC

SEQ ID NO: 478 - protein, 12 aa, Artificial Sequence
  Synthetically generated peptide
PGCGICYACTGC

SEQ ID NO: 479 - protein, 12 aa, Artificial Sequence
  Synthetically generated peptide
PGCGICYAACGC

SEQ ID NO: 480 - protein, 12 aa, Artificial Sequence
  Synthetically generated peptide
PGCGICYAACTC

SEQ ID NO: 481 - protein, 13 aa, Artificial Sequence
  Synthetically generated peptide
PGCGICAAACTGC

SEQ ID NO: 482 - protein, 12 aa, Artificial Sequence
  Synthetically generated peptide
PGCGICAACTGC

SEQ ID NO: 483 - protein, 12 aa, Artificial Sequence
  Synthetically generated peptide
PGCGICAACTGC

SEQ ID NO: 484 - protein, 12 aa, Artificial Sequence
  Synthetically generated peptide
PGCGICAAACGC

SEQ ID NO: 485 - protein, 12 aa, Artificial Sequence
  Synthetically generated peptide
PGCGICAAACTC

SEQ ID NO: 486 - protein, 13 aa, Artificial Sequence
  Synthetically generated peptide
PGCGICAYACTGC

SEQ ID NO: 487 - protein, 12 aa, Artificial Sequence
  Synthetically generated peptide
PGCGICAYCTGC

SEQ ID NO: 488 - protein, 12 aa, Artificial Sequence
  Synthetically generated peptide
PGCGICAYACGC

SEQ ID NO: 489 - protein, 12 aa, Artificial Sequence
  Synthetically generated peptide
PGCGICAYACTC

SEQ ID NO: 490 - protein, 13 aa, Artificial Sequence
  Synthetically generated peptide
PGCGICAYACTGC

SEQ ID NO: 491 - protein, 12 aa, Artificial Sequence
  Synthetically generated peptide
PGCGICAYACGC

SEQ ID NO: 492 - protein, 12 aa, Artificial Sequence
  Synthetically generated peptide
PGCGICAYACTC

SEQ ID NO: 493 - protein, 13 aa, Artificial Sequence
  Synthetically generated peptide
PGCGICAYAACGC

SEQ ID NO: 494 - protein, 12 aa, Artificial Sequence
  Synthetically generated peptide
PGCGICAYAACC

SEQ ID NO: 495 - protein, 13 aa, Artificial Sequence
  Synthetically generated peptide
PGCGICAYAACTC

SEQ ID NO: 496 - protein, 14 aa, Artificial Sequence
  Synthetically generated peptide
PGCGECAYAACTGC

SEQ ID NO: 497 - protein, 13 aa, Artificial Sequence
  Synthetically generated peptide
PGCGECYAACTGC

SEQ ID NO: 498 - protein, 12 aa, Artificial Sequence
  Synthetically generated peptide
PGCGECAACTGC

SEQ ID NO: 499 - protein, 12 aa, Artificial Sequence
  Synthetically generated peptide
PGCGECYACTGC

SEQ ID NO: 500 - protein, 12 aa, Artificial Sequence
  Synthetically generated peptide
PGCGECYACTGC

SEQ ID NO: 501 - protein, 12 aa, Artificial Sequence
  Synthetically generated peptide
PGCGECYAACGC

SEQ ID NO: 502 - protein, 12 aa, Artificial Sequence
  Synthetically generated peptide
PGCGECYAACTC

SEQ ID NO: 503 - protein, 13 aa, Artificial Sequence
  Synthetically generated peptide
PGCGECAAACTGC

SEQ ID NO: 504 - protein, 12 aa, Artificial Sequence
  Synthetically generated peptide
PGCGECAACTGC

SEQ ID NO: 505 - protein, 12 aa, Artificial Sequence
  Synthetically generated peptide
PGCGECAACTGC

SEQ ID NO: 506 - protein, 12 aa, Artificial Sequence
  Synthetically generated peptide
PGCGECAAACGC

SEQ ID NO: 507 - protein, 12 aa, Artificial Sequence
  Synthetically generated peptide
PGCGECAAACTC

SEQ ID NO: 508 - protein, 13 aa, Artificial Sequence
  Synthetically generated peptide
PGCGECAYACTGC

SEQ ID NO: 509 - protein, 12 aa, Artificial Sequence
  Synthetically generated peptide
PGCGECAYCTGC

SEQ ID NO: 510 - protein, 12 aa, Artificial Sequence
  Synthetically generated peptide
PGCGECAYACGC

SEQ ID NO: 511 - protein, 12 aa, Artificial Sequence
  Synthetically generated peptide
PGCGECAYACTC

SEQ ID NO: 512 - protein, 13 aa, Artificial Sequence
  Synthetically generated peptide
PGCGECAYACTGC

SEQ ID NO: 513 - protein, 12 aa, Artificial Sequence
  Synthetically generated peptide
PGCGECAYACGC

SEQ ID NO: 514 - protein, 12 aa, Artificial Sequence
  Synthetically generated peptide
PGCGECAYACTC

SEQ ID NO: 515 - protein, 13 aa, Artificial Sequence
  Synthetically generated peptide
PGCGECAYAACGC

SEQ ID NO: 516 - protein, 12 aa, Artificial Sequence
  Synthetically generated peptide
PGCGECAYAACC

SEQ ID NO: 517 - protein, 13 aa, Artificial Sequence
  Synthetically generated peptide
PGCGECAYAACTC

SEQ ID NO: 518 - protein, 14 aa, Artificial Sequence
  Synthetically generated peptide
PGCGEICYAACTGC

SEQ ID NO: 519 - protein, 13 aa, Artificial Sequence
  Synthetically generated peptide
PGCGEICAACTGC

SEQ ID NO: 520 - protein, 12 aa, Artificial Sequence
  Synthetically generated peptide
PGCGEICACTGC

SEQ ID NO: 521 - protein, 12 aa, Artificial Sequence
  Synthetically generated peptide
PGCGEICACTGC

SEQ ID NO: 522 - protein, 12 aa, Artificial Sequence
  Synthetically generated peptide
PGCGEICAACGC

SEQ ID NO: 523 - protein, 12 aa, Artificial Sequence
  Synthetically generated peptide
PGCGEICAACTC

SEQ ID NO: 524 - protein, 13 aa, Artificial Sequence
  Synthetically generated peptide
PGCGEICYACTGC

SEQ ID NO: 525 - protein, 12 aa, Artificial Sequence
  Synthetically generated peptide
PGCGEICYCTGC

SEQ ID NO: 526 - protein, 12 aa, Artificial Sequence
  Synthetically generated peptide
PGCGEICYACGC

SEQ ID NO: 527 - protein, 12 aa, Artificial Sequence
  Synthetically generated peptide
PGCGEICYACTC

SEQ ID NO: 528 - protein, 13 aa, Artificial Sequence
  Synthetically generated peptide
PGCGEICYACTGC

SEQ ID NO: 529 - protein, 12 aa, Artificial Sequence
  Synthetically generated peptide
PGCGEICYACGC

SEQ ID NO: 530 - protein, 12 aa, Artificial Sequence
  Synthetically generated peptide
PGCGEICYACTC

SEQ ID NO: 531 - protein, 13 aa, Artificial Sequence
  Synthetically generated peptide
PGCGEICYAACGC

SEQ ID NO: 532 - protein, 12 aa, Artificial Sequence
  Synthetically generated peptide
PGCGEICYAACC

SEQ ID NO: 533 - protein, 13 aa, Artificial Sequence
  Synthetically generated peptide
PGCGEICYAACTC

SEQ ID NO: 534 - protein, 14 aa, Artificial Sequence
  Synthetically generated peptide
PGCGEICAAACTGC

SEQ ID NO: 535 - protein, 13 aa, Artificial Sequence
  Synthetically generated peptide
PGCGEICAACTGC

SEQ ID NO: 536 - protein, 12 aa, Artificial Sequence
  Synthetically generated peptide
PGCGEICACTGC

SEQ ID NO: 537 - protein, 12 aa, Artificial Sequence
  Synthetically generated peptide
PGCGEICAACGC

SEQ ID NO: 538 - protein, 12 aa, Artificial Sequence
  Synthetically generated peptide
PGCGEICAACTC

SEQ ID NO: 539 - protein, 13 aa, Artificial Sequence
  Synthetically generated peptide
PGCGEICAACTGC

SEQ ID NO: 540 - protein, 12 aa, Artificial Sequence
  Synthetically generated peptide
PGCGEICAACGC

SEQ ID NO: 541 - protein, 12 aa, Artificial Sequence
  Synthetically generated peptide
PGCGEICAACTC

SEQ ID NO: 542 - protein, 13 aa, Artificial Sequence
  Synthetically generated peptide
PGCGEICAAACGC

SEQ ID NO: 543 - protein, 12 aa, Artificial Sequence
  Synthetically generated peptide
PGCGEICAAACC

SEQ ID NO: 544 - protein, 13 aa, Artificial Sequence
  Synthetically generated peptide
PGCGEICAAACTC

SEQ ID NO: 545 - protein, 14 aa, Artificial Sequence
  Synthetically generated peptide
PGCGEICAYACTGC

SEQ ID NO: 546 - protein, 13 aa, Artificial Sequence
  Synthetically generated peptide
PGCGEICAYCTGC

SEQ ID NO: 547 - protein, 12 aa, Artificial Sequence
  Synthetically generated peptide
PGCGEICAYCGC

SEQ ID NO: 548 - protein, 12 aa, Artificial Sequence
  Synthetically generated peptide
PGCGEICAYCTC

SEQ ID NO: 549 - protein, 13 aa, Artificial Sequence
  Synthetically generated peptide
PGCGEICAYACGC

SEQ ID NO: 550 - protein, 12 aa, Artificial Sequence
  Synthetically generated peptide
PGCGEICAYACC

SEQ ID NO: 551 - protein, 13 aa, Artificial Sequence
  Synthetically generated peptide
PGCGEICAYACTC

SEQ ID NO: 552 - protein, 14 aa, Artificial Sequence
  Synthetically generated peptide
PGCGEICAYACTGC

SEQ ID NO: 553 - protein, 13 aa, Artificial Sequence
  Synthetically generated peptide
PGCGEICAYACGC

SEQ ID NO: 554 - protein, 12 aa, Artificial Sequence
  Synthetically generated peptide
PGCGEICAYACC

SEQ ID NO: 555 - protein, 13 aa, Artificial Sequence
  Synthetically generated peptide
PGCGEICAYACTC

SEQ ID NO: 556 - protein, 14 aa, Artificial Sequence
  Synthetically generated peptide
PGCGEICAYAACGC

SEQ ID NO: 557 - protein, 13 aa, Artificial Sequence
  Synthetically generated peptide
PGCGEICAYAACC

SEQ ID NO: 558 - protein, 14 aa, Artificial Sequence
  Synthetically generated peptide
PGCGEICAYAACTC

SEQ ID NO: 559 - protein, 15 aa, Artificial Sequence
  Synthetically generated peptide
PGTCEICAYAACTGC

SEQ ID NO: 560 - protein, 14 aa, Artificial Sequence
  Synthetically generated peptide
PGTCICAYAACTGC

SEQ ID NO: 561 - protein, 13 aa, Artificial Sequence
  Synthetically generated peptide
PGTCCAYAACTGC

SEQ ID NO: 562 - protein, 12 aa, Artificial Sequence
  Synthetically generated peptide
PGTCCYAACTGC

SEQ ID NO: 563 - protein, 12 aa, Artificial Sequence
  Synthetically generated peptide
PGTCCAAACTGC

SEQ ID NO: 564 - protein, 12 aa, Artificial Sequence
  Synthetically generated peptide
PGTCCAYACTGC

SEQ ID NO: 565 - protein, 12 aa, Artificial Sequence
  Synthetically generated peptide
PGTCCAYACTGC

SEQ ID NO: 566 - protein, 12 aa, Artificial Sequence
  Synthetically generated peptide
PGTCCAYAACGC

SEQ ID NO: 567 - protein, 12 aa, Artificial Sequence
  Synthetically generated peptide
PGTCCAYAACTC

SEQ ID NO: 568 - protein, 13 aa, Artificial Sequence
  Synthetically generated peptide
PGTCICYAACTGC

SEQ ID NO: 569 - protein, 12 aa, Artificial Sequence
  Synthetically generated peptide
PGTCICAACTGC

SEQ ID NO: 570 - protein, 12 aa, Artificial Sequence
  Synthetically generated peptide
PGTCICYACTGC

SEQ ID NO: 571 - protein, 12 aa, Artificial Sequence
  Synthetically generated peptide
PGTCICYACTGC

SEQ ID NO: 572 - protein, 12 aa, Artificial Sequence
  Synthetically generated peptide
PGTCICYAACGC

SEQ ID NO: 573 - protein, 12 aa, Artificial Sequence
  Synthetically generated peptide
PGTCICYAACTC

SEQ ID NO: 574 - protein, 13 aa, Artificial Sequence
  Synthetically generated peptide
PGTCICAAACTGC

SEQ ID NO: 575 - protein, 12 aa, Artificial Sequence
  Synthetically generated peptide
PGTCICAACTGC

SEQ ID NO: 576 - protein, 12 aa, Artificial Sequence
  Synthetically generated peptide
PGTCICAACTGC

SEQ ID NO: 577 - protein, 12 aa, Artificial Sequence
  Synthetically generated peptide
PGTCICAAACGC

SEQ ID NO: 578 - protein, 12 aa, Artificial Sequence
  Synthetically generated peptide
PGTCICAAACTC

SEQ ID NO: 579 - protein, 13 aa, Artificial Sequence
  Synthetically generated peptide
PGTCICAYACTGC

SEQ ID NO: 580 - protein, 12 aa, Artificial Sequence
  Synthetically generated peptide
PGTCICAYCTGC

SEQ ID NO: 581 - protein, 12 aa, Artificial Sequence
  Synthetically generated peptide
PGTCICAYACGC

SEQ ID NO: 582 - protein, 12 aa, Artificial Sequence
  Synthetically generated peptide
PGTCICAYACTC

SEQ ID NO: 583 - protein, 13 aa, Artificial Sequence
  Synthetically generated peptide
PGTCICAYACTGC

SEQ ID NO: 584 - protein, 12 aa, Artificial Sequence
  Synthetically generated peptide
PGTCICAYACGC

SEQ ID NO: 585 - protein, 12 aa, Artificial Sequence
  Synthetically generated peptide
PGTCICAYACTC

SEQ ID NO: 586 - protein, 13 aa, Artificial Sequence
  Synthetically generated peptide
PGTCICAYAACGC

SEQ ID NO: 587 - protein, 12 aa, Artificial Sequence
  Synthetically generated peptide
PGTCICAYAACC

SEQ ID NO: 588 - protein, 13 aa, Artificial Sequence
  Synthetically generated peptide
PGTCICAYAACTC

SEQ ID NO: 589 - protein, 14 aa, Artificial Sequence
  Synthetically generated peptide
PGTCECAYAACTGC

SEQ ID NO: 590 - protein, 13 aa, Artificial Sequence
  Synthetically generated peptide
PGTCECYAACTGC

SEQ ID NO: 591 - protein, 12 aa, Artificial Sequence
  Synthetically generated peptide
PGTCECAACTGC

SEQ ID NO: 592 - protein, 12 aa, Artificial Sequence
  Synthetically generated peptide
PGTCECYACTGC

SEQ ID NO: 593 - protein, 12 aa, Artificial Sequence
  Synthetically generated peptide
PGTCECYACTGC

SEQ ID NO: 594 - protein, 12 aa, Artificial Sequence
  Synthetically generated peptide
PGTCECYAACGC

SEQ ID NO: 595 - protein, 12 aa, Artificial Sequence
  Synthetically generated peptide
PGTCECYAACTC

SEQ ID NO: 596 - protein, 13 aa, Artificial Sequence
  Synthetically generated peptide
PGTCECAAACTGC

SEQ ID NO: 597 - protein, 12 aa, Artificial Sequence
  Synthetically generated peptide
PGTCECAACTGC

SEQ ID NO: 598 - protein, 12 aa, Artificial Sequence
  Synthetically generated peptide
PGTCECAACTGC

SEQ ID NO: 599 - protein, 12 aa, Artificial Sequence
  Synthetically generated peptide
PGTCECAAACGC

SEQ ID NO: 600 - protein, 12 aa, Artificial Sequence
  Synthetically generated peptide
PGTCECAAACTC

SEQ ID NO: 601 - protein, 13 aa, Artificial Sequence
  Synthetically generated peptide
PGTCECAYACTGC

SEQ ID NO: 602 - protein, 12 aa, Artificial Sequence
  Synthetically generated peptide
PGTCECAYCTGC

SEQ ID NO: 603 - protein, 12 aa, Artificial Sequence
  Synthetically generated peptide
PGTCECAYACGC

SEQ ID NO: 604 - protein, 12 aa, Artificial Sequence
  Synthetically generated peptide
PGTCECAYACTC

SEQ ID NO: 605 - protein, 13 aa, Artificial Sequence
  Synthetically generated peptide
PGTCECAYACTGC

SEQ ID NO: 606 - protein, 12 aa, Artificial Sequence
  Synthetically generated peptide
PGTCECAYACGC

SEQ ID NO: 607 - protein, 12 aa, Artificial Sequence
  Synthetically generated peptide
PGTCECAYACTC

SEQ ID NO: 608 - protein, 13 aa, Artificial Sequence
  Synthetically generated peptide
PGTCECAYAACGC

SEQ ID NO: 609 - protein, 12 aa, Artificial Sequence
  Synthetically generated peptide
PGTCECAYAACC

SEQ ID NO: 610 - protein, 13 aa, Artificial Sequence
  Synthetically generated peptide
PGTCECAYAACTC

SEQ ID NO: 611 - protein, 14 aa, Artificial Sequence
  Synthetically generated peptide
PGTCEICYAACTGC

SEQ ID NO: 612 - protein, 13 aa, Artificial Sequence
  Synthetically generated peptide
PGTCEICAACTGC

SEQ ID NO: 613 - protein, 12 aa, Artificial Sequence
  Synthetically generated peptide
PGTCEICACTGC

SEQ ID NO: 614 - protein, 12 aa, Artificial Sequence
  Synthetically generated peptide
PGTCEICACTGC

SEQ ID NO: 615 - protein, 12 aa, Artificial Sequence
  Synthetically generated peptide
PGTCEICAACGC

SEQ ID NO: 616 - protein, 12 aa, Artificial Sequence
  Synthetically generated peptide
PGTCEICAACTC

SEQ ID NO: 617 - protein, 13 aa, Artificial Sequence
  Synthetically generated peptide
PGTCEICYACTGC

SEQ ID NO: 618 - protein, 12 aa, Artificial Sequence
  Synthetically generated peptide
PGTCEICYCTGC

SEQ ID NO: 619 - protein, 12 aa, Artificial Sequence
  Synthetically generated peptide
PGTCEICYACGC

SEQ ID NO: 620 - protein, 12 aa, Artificial Sequence
  Synthetically generated peptide
PGTCEICYACTC

SEQ ID NO: 621 - protein, 13 aa, Artificial Sequence
  Synthetically generated peptide
PGTCEICYACTGC

SEQ ID NO: 622 - protein, 12 aa, Artificial Sequence
  Synthetically generated peptide
PGTCEICYACGC

SEQ ID NO: 623 - protein, 12 aa, Artificial Sequence
  Synthetically generated peptide
PGTCEICYACTC

SEQ ID NO: 624 - protein, 13 aa, Artificial Sequence
  Synthetically generated peptide
PGTCEICYAACGC

SEQ ID NO: 625 - protein, 12 aa, Artificial Sequence
  Synthetically generated peptide
PGTCEICYAACC

SEQ ID NO: 626 - protein, 13 aa, Artificial Sequence
  Synthetically generated peptide
PGTCEICYAACTC

SEQ ID NO: 627 - protein, 14 aa, Artificial Sequence
  Synthetically generated peptide
PGTCEICAAACTGC

SEQ ID NO: 628 - protein, 13 aa, Artificial Sequence
  Synthetically generated peptide
PGTCEICAACTGC

SEQ ID NO: 629 - protein, 12 aa, Artificial Sequence
  Synthetically generated peptide
PGTCEICACTGC

SEQ ID NO: 630 - protein, 12 aa, Artificial Sequence
  Synthetically generated peptide
PGTCEICAACGC

SEQ ID NO: 631 - protein, 12 aa, Artificial Sequence
  Synthetically generated peptide
PGTCEICAACTC

SEQ ID NO: 632 - protein, 13 aa, Artificial Sequence
  Synthetically generated peptide
PGTCEICAACTGC

SEQ ID NO: 633 - protein, 12 aa, Artificial Sequence
  Synthetically generated peptide
PGTCEICAACGC

SEQ ID NO: 634 - protein, 12 aa, Artificial Sequence
  Synthetically generated peptide
PGTCEICAACTC

SEQ ID NO: 635 - protein, 13 aa, Artificial Sequence
  Synthetically generated peptide
PGTCEICAAACGC

SEQ ID NO: 636 - protein, 12 aa, Artificial Sequence
  Synthetically generated peptide
PGTCEICAAACC

SEQ ID NO: 637 - protein, 13 aa, Artificial Sequence
  Synthetically generated peptide
PGTCEICAAACTC

SEQ ID NO: 638 - protein, 14 aa, Artificial Sequence
  Synthetically generated peptide
PGTCEICAYACTGC

SEQ ID NO: 639 - protein, 13 aa, Artificial Sequence
  Synthetically generated peptide
PGTCEICAYCTGC

SEQ ID NO: 640 - protein, 12 aa, Artificial Sequence
  Synthetically generated peptide
PGTCEICAYCGC

SEQ ID NO: 641 - protein, 12 aa, Artificial Sequence
  Synthetically generated peptide
PGTCEICAYCTC

SEQ ID NO: 642 - protein, 13 aa, Artificial Sequence
  Synthetically generated peptide
PGTCEICAYACGC

SEQ ID NO: 643 - protein, 12 aa, Artificial Sequence
  Synthetically generated peptide
PGTCEICAYACC

SEQ ID NO: 644 - protein, 13 aa, Artificial Sequence
  Synthetically generated peptide
PGTCEICAYACTC

SEQ ID NO: 645 - protein, 14 aa, Artificial Sequence
  Synthetically generated peptide
PGTCEICAYACTGC

SEQ ID NO: 646 - protein, 13 aa, Artificial Sequence
  Synthetically generated peptide
PGTCEICAYACGC

SEQ ID NO: 647 - protein, 12 aa, Artificial Sequence
  Synthetically generated peptide
PGTCEICAYACC

SEQ ID NO: 648 - protein, 13 aa, Artificial Sequence
  Synthetically generated peptide
PGTCEICAYACTC

SEQ ID NO: 649 - protein, 14 aa, Artificial Sequence
  Synthetically generated peptide
PGTCEICAYAACGC

SEQ ID NO: 650 - protein, 13 aa, Artificial Sequence
  Synthetically generated peptide
PGTCEICAYAACC

SEQ ID NO: 651 - protein, 14 aa, Artificial Sequence
  Synthetically generated peptide
PGTCEICAYAACTC

SEQ ID NO: 652 - protein, 15 aa, Artificial Sequence [sequence omitted]

SEQ ID NO: 653 - protein, 14 aa, Artificial Sequence
  Synthetically generated peptide
PGTCGCAYAACTGC

SEQ ID NO: 654 - protein, 13 aa, Artificial Sequence
  Synthetically generated peptide
PGTCGCYAACTGC

SEQ ID NO: 655 - protein, 12 aa, Artificial Sequence
  Synthetically generated peptide
PGTCGCAACTGC

SEQ ID NO: 656 - protein, 12 aa, Artificial Sequence
  Synthetically generated peptide
PGTCGCYACTGC

SEQ ID NO: 657 - protein, 12 aa, Artificial Sequence
  Synthetically generated peptide
PGTCGCYACTGC

SEQ ID NO: 658 - protein, 12 aa, Artificial Sequence
  Synthetically generated peptide
PGTCGCYAACGC

SEQ ID NO: 659 - protein, 12 aa, Artificial Sequence
  Synthetically generated peptide
PGTCGCYAACTC

SEQ ID NO: 660 - protein, 13 aa, Artificial Sequence
  Synthetically generated peptide
PGTCGCAAACTGC

SEQ ID NO: 661 - protein, 12 aa, Artificial Sequence
  Synthetically generated peptide
PGTCGCAACTGC

SEQ ID NO: 662 - protein, 12 aa, Artificial Sequence
  Synthetically generated peptide
PGTCGCAACTGC

SEQ ID NO: 663 - protein, 12 aa, Artificial Sequence
  Synthetically generated peptide
PGTCGCAAACGC

SEQ ID NO: 664 - protein, 12 aa, Artificial Sequence
  Synthetically generated peptide
PGTCGCAAACTC

SEQ ID NO: 665 - protein, 13 aa, Artificial Sequence
  Synthetically generated peptide
PGTCGCAYACTGC

SEQ ID NO: 666 - protein, 12 aa, Artificial Sequence
  Synthetically generated peptide
PGTCGCAYCTGC

SEQ ID NO: 667 - protein, 12 aa, Artificial Sequence
  Synthetically generated peptide
PGTCGCAYACGC

SEQ ID NO: 668 - protein, 12 aa, Artificial Sequence
  Synthetically generated peptide
PGTCGCAYACTC

SEQ ID NO: 669 - protein, 13 aa, Artificial Sequence
  Synthetically generated peptide
PGTCGCAYACTGC

SEQ ID NO: 670 - protein, 12 aa, Artificial Sequence
  Synthetically generated peptide
PGTCGCAYACGC

SEQ ID NO: 671 - protein, 12 aa, Artificial Sequence
  Synthetically generated peptide
PGTCGCAYACTC

SEQ ID NO: 672 - protein, 13 aa, Artificial Sequence
  Synthetically generated peptide
PGTCGCAYAACGC

SEQ ID NO: 673 - protein, 12 aa, Artificial Sequence
  Synthetically generated peptide
PGTCGCAYAACC

SEQ ID NO: 674 - protein, 13 aa, Artificial Sequence
  Synthetically generated peptide
PGTCGCAYAACTC

SEQ ID NO: 675 - protein, 14 aa, Artificial Sequence
  Synthetically generated peptide
PGTCGICYAACTGC

SEQ ID NO: 676 - protein, 13 aa, Artificial Sequence
  Synthetically generated peptide
PGTCGICAACTGC

SEQ ID NO: 677 - protein, 12 aa, Artificial Sequence
  Synthetically generated peptide
PGTCGICACTGC

SEQ ID NO: 678 - protein, 12 aa, Artificial Sequence
  Synthetically generated peptide
PGTCGICACTGC

SEQ ID NO: 679 - protein, 12 aa, Artificial Sequence
  Synthetically generated peptide
PGTCGICAACGC

SEQ ID NO: 680 - protein, 12 aa, Artificial Sequence
  Synthetically generated peptide
PGTCGICAACTC

SEQ ID NO: 681 - protein, 13 aa, Artificial Sequence
  Synthetically generated peptide
PGTCGICYACTGC

SEQ ID NO: 682 - protein, 12 aa, Artificial Sequence
  Synthetically generated peptide
PGTCGICYCTGC

SEQ ID NO: 683 - protein, 12 aa, Artificial Sequence
  Synthetically generated peptide
PGTCGICYACGC

SEQ ID NO: 684 - protein, 12 aa, Artificial Sequence
  Synthetically generated peptide
PGTCGICYACTC

SEQ ID NO: 685 - protein, 13 aa, Artificial Sequence
  Synthetically generated peptide
PGTCGICYACTGC

SEQ ID NO: 686 - protein, 12 aa, Artificial Sequence
  Synthetically generated peptide
PGTCGICYACGC

SEQ ID NO: 687 - protein, 12 aa, Artificial Sequence
  Synthetically generated peptide
PGTCGICYACTC

SEQ ID NO: 688 - protein, 13 aa, Artificial Sequence
  Synthetically generated peptide
PGTCGICYAACGC

SEQ ID NO: 689 - protein, 12 aa, Artificial Sequence
  Synthetically generated peptide
PGTCGICYAACC

SEQ ID NO: 690 - protein, 13 aa, Artificial Sequence
  Synthetically generated peptide
PGTCGICYAACTC

SEQ ID NO: 691 - protein, 14 aa, Artificial Sequence
  Synthetically generated peptide
PGTCGICAAACTGC

SEQ ID NO: 692 - protein, 13 aa, Artificial Sequence
  Synthetically generated peptide
PGTCGICAACTGC

SEQ ID NO: 693 - protein, 12 aa, Artificial Sequence
  Synthetically generated peptide
PGTCGICACTGC

SEQ ID NO: 694 - protein, 12 aa, Artificial Sequence
  Synthetically generated peptide
PGTCGICAACGC

SEQ ID NO: 695 - protein, 12 aa, Artificial Sequence
  Synthetically generated peptide
PGTCGICAACTC

SEQ ID NO: 696 - protein, 13 aa, Artificial Sequence
  Synthetically generated peptide
PGTCGICAACTGC

SEQ ID NO: 697 - protein, 12 aa, Artificial Sequence
  Synthetically generated peptide
PGTCGICAACGC

SEQ ID NO: 698 - protein, 12 aa, Artificial Sequence
  Synthetically generated peptide
PGTCGICAACTC

SEQ ID NO: 699 - protein, 13 aa, Artificial Sequence
  Synthetically generated peptide
PGTCGICAAACGC

SEQ ID NO: 700 - protein, 12 aa, Artificial Sequence
  Synthetically generated peptide
PGTCGICAAACC

SEQ ID NO: 701 - protein, 13 aa, Artificial Sequence
  Synthetically generated peptide
PGTCGICAAACTC

SEQ ID NO: 702 - protein, 14 aa, Artificial Sequence
  Synthetically generated peptide
PGTCGICAYACTGC

SEQ ID NO: 703 - protein, 13 aa, Artificial Sequence
  Synthetically generated peptide
PGTCGICAYCTGC

SEQ ID NO: 704 - protein, 12 aa, Artificial Sequence
  Synthetically generated peptide
PGTCGICAYCGC

SEQ ID NO: 705 - protein, 12 aa, Artificial Sequence
  Synthetically generated peptide
PGTCGICAYCTC

SEQ ID NO: 706 - protein, 13 aa, Artificial Sequence
  Synthetically generated peptide
PGTCGICAYACGC

SEQ ID NO: 707 - protein, 12 aa, Artificial Sequence
  Synthetically generated peptide
PGTCGICAYACC

SEQ ID NO: 708 - protein, 13 aa, Artificial Sequence
  Synthetically generated peptide
PGTCGICAYACTC

SEQ ID NO: 709 - protein, 14 aa, Artificial Sequence
  Synthetically generated peptide
PGTCGICAYACTGC

SEQ ID NO: 710 - protein, 13 aa, Artificial Sequence
  Synthetically generated peptide
PGTCGICAYACGC

SEQ ID NO: 711 - protein, 12 aa, Artificial Sequence
  Synthetically generated peptide
PGTCGICAYACC

SEQ ID NO: 712 - protein, 13 aa, Artificial Sequence
  Synthetically generated peptide
PGTCGICAYACTC

SEQ ID NO: 713 - protein, 14 aa, Artificial Sequence
  Synthetically generated peptide
PGTCGICAYAACGC

SEQ ID NO: 714 - protein, 13 aa, Artificial Sequence
  Synthetically generated peptide
PGTCGICAYAACC

SEQ ID NO: 715 - protein, 14 aa, Artificial Sequence
  Synthetically generated peptide
PGTCGICAYAACTC

SEQ ID NO: 716 - protein, 15 aa, Artificial Sequence
  Synthetically generated peptide
PGTCGECAYAACTGC

SEQ ID NO: 717 - protein, 14 aa, Artificial Sequence
  Synthetically generated peptide
PGTCGECYAACTGC

SEQ ID NO: 718 - protein, 13 aa, Artificial Sequence
  Synthetically generated peptide
PGTCGECAACTGC

SEQ ID NO: 719 - protein, 12 aa, Artificial Sequence
  Synthetically generated peptide
PGTCGECACTGC

SEQ ID NO: 720 - protein, 12 aa, Artificial Sequence
  Synthetically generated peptide
PGTCGECACTGC

SEQ ID NO: 721 - protein, 12 aa, Artificial Sequence
  Synthetically generated peptide
PGTCGECAACGC

SEQ ID NO: 722 - protein, 12 aa, Artificial Sequence
  Synthetically generated peptide
PGTCGECAACTC

SEQ ID NO: 723 - protein, 13 aa, Artificial Sequence
  Synthetically generated peptide
PGTCGECYACTGC

SEQ ID NO: 724 - protein, 12 aa, Artificial Sequence
  Synthetically generated peptide
PGTCGECYCTGC

SEQ ID NO: 725 - protein, 12 aa, Artificial Sequence
  Synthetically generated peptide
PGTCGECYACGC

SEQ ID NO: 726 - protein, 12 aa, Artificial Sequence
  Synthetically generated peptide
PGTCGECYACTC

SEQ ID NO: 727 - protein, 13 aa, Artificial Sequence
  Synthetically generated peptide
PGTCGECYACTGC

SEQ ID NO: 728 - protein, 12 aa, Artificial Sequence
  Synthetically generated peptide
PGTCGECYACGC

SEQ ID NO: 729 - protein, 12 aa, Artificial Sequence
  Synthetically generated peptide
PGTCGECYACTC

SEQ ID NO: 730 - protein, 13 aa, Artificial Sequence
  Synthetically generated peptide
PGTCGECYAACGC

SEQ ID NO: 731 - protein, 12 aa, Artificial Sequence
  Synthetically generated peptide
PGTCGECYAACC

SEQ ID NO: 732 - protein, 13 aa, Artificial Sequence
  Synthetically generated peptide
PGTCGECYAACTC

SEQ ID NO: 733 - protein, 14 aa, Artificial Sequence
  Synthetically generated peptide
PGTCGECAAACTGC

SEQ ID NO: 734 - protein, 13 aa, Artificial Sequence
  Synthetically generated peptide
PGTCGECAACTGC

SEQ ID NO: 735 - protein, 12 aa, Artificial Sequence
  Synthetically generated peptide
PGTCGECACTGC

SEQ ID NO: 736 - protein, 12 aa, Artificial Sequence
  Synthetically generated peptide
PGTCGECAACGC

SEQ ID NO: 737 - protein, 12 aa, Artificial Sequence
  Synthetically generated peptide
PGTCGECAACTC

SEQ ID NO: 738 - protein, 13 aa, Artificial Sequence
  Synthetically generated peptide
PGTCGECAACTGC

SEQ ID NO: 739 - protein, 12 aa, Artificial Sequence
  Synthetically generated peptide
PGTCGECAACGC

SEQ ID NO: 740 - protein, 12 aa, Artificial Sequence
  Synthetically generated peptide
PGTCGECAACTC

SEQ ID NO: 741 - protein, 13 aa, Artificial Sequence
  Synthetically generated peptide
PGTCGECAAACGC

SEQ ID NO: 742 - protein, 12 aa, Artificial Sequence
  Synthetically generated peptide
PGTCGECAAACC

SEQ ID NO: 743 - protein, 13 aa, Artificial Sequence
  Synthetically generated peptide
PGTCGECAAACTC

SEQ ID NO: 744 - protein, 14 aa, Artificial Sequence
  Synthetically generated peptide
PGTCGECAYACTGC

SEQ ID NO: 745 - protein, 13 aa, Artificial Sequence
  Synthetically generated peptide
PGTCGECAYCTGC

SEQ ID NO: 746 - protein, 12 aa, Artificial Sequence
  Synthetically generated peptide
PGTCGECAYCGC

SEQ ID NO: 747 - protein, 12 aa, Artificial Sequence
  Synthetically generated peptide
PGTCGECAYCTC

SEQ ID NO: 748 - protein, 13 aa, Artificial Sequence
  Synthetically generated peptide
PGTCGECAYACGC

SEQ ID NO: 749 - protein, 12 aa, Artificial Sequence
  Synthetically generated peptide
PGTCGECAYACC

SEQ ID NO: 750 - protein, 13 aa, Artificial Sequence
  Synthetically generated peptide
PGTCGECAYACTC

SEQ ID NO: 751 - protein, 14 aa, Artificial Sequence
  Synthetically generated peptide
PGTCGECAYACTGC

SEQ ID NO: 752 - protein, 13 aa, Artificial Sequence
  Synthetically generated peptide
PGTCGECAYACGC

SEQ ID NO: 753 - protein, 12 aa, Artificial Sequence
  Synthetically generated peptide
PGTCGECAYACC

SEQ ID NO: 754 - protein, 13 aa, Artificial Sequence
  Synthetically generated peptide
PGTCGECAYACTC

SEQ ID NO: 755 - protein, 14 aa, Artificial Sequence
  Synthetically generated peptide
PGTCGECAYAACGC

SEQ ID NO: 756 - protein, 13 aa, Artificial Sequence
  Synthetically generated peptide
PGTCGECAYAACC

SEQ ID NO: 757 - protein, 14 aa, Artificial Sequence
  Synthetically generated peptide
PGTCGECAYAACTC

SEQ ID NO: 758 - protein, 15 aa, Artificial Sequence
  Synthetically generated peptide
PGTCGEICYAACTGC

SEQ ID NO: 759 - protein, 14 aa, Artificial Sequence
  Synthetically generated peptide
PGTCGEICAACTGC

SEQ ID NO: 760 - protein, 13 aa, Artificial Sequence
  Synthetically generated peptide
PGTCGEICACTGC

SEQ ID NO: 761 - protein, 12 aa, Artificial Sequence
  Synthetically generated peptide
PGTCGEICCTGC

SEQ ID NO: 762 - protein, 12 aa, Artificial Sequence
  Synthetically generated peptide
PGTCGEICACGC

SEQ ID NO: 763 - protein, 12 aa, Artificial Sequence
  Synthetically generated peptide
PGTCGEICACTC

SEQ ID NO: 764 - protein, 13 aa, Artificial Sequence
  Synthetically generated peptide
PGTCGEICACTGC

SEQ ID NO: 765 - protein, 12 aa, Artificial Sequence
  Synthetically generated peptide
PGTCGEICACGC

SEQ ID NO: 766 - protein, 12 aa, Artificial Sequence
  Synthetically generated peptide
PGTCGEICACTC

SEQ ID NO: 767 - protein, 13 aa, Artificial Sequence
  Synthetically generated peptide
PGTCGEICAACGC

SEQ ID NO: 768 - protein, 12 aa, Artificial Sequence
  Synthetically generated peptide
PGTCGEICAACC

SEQ ID NO: 769 - protein, 13 aa, Artificial Sequence
  Synthetically generated peptide
PGTCGEICAACTC

SEQ ID NO: 770 - protein, 14 aa, Artificial Sequence
  Synthetically generated peptide
PGTCGEICYACTGC

SEQ ID NO: 771 - protein, 13 aa, Artificial Sequence
  Synthetically generated peptide
PGTCGEICYCTGC

SEQ ID NO: 772 - protein, 12 aa, Artificial Sequence
  Synthetically generated peptide
PGTCGEICYCGC

SEQ ID NO: 773 - protein, 12 aa, Artificial Sequence
  Synthetically generated peptide
PGTCGEICYCTC

SEQ ID NO: 774 - protein, 13 aa, Artificial Sequence
  Synthetically generated peptide
PGTCGEICYACGC

SEQ ID NO: 775 - protein, 12 aa, Artificial Sequence
  Synthetically generated peptide
PGTCGEICYACC

SEQ ID NO: 776 - protein, 13 aa, Artificial Sequence
  Synthetically generated peptide
PGTCGEICYACTC

SEQ ID NO: 777 - protein, 14 aa, Artificial Sequence
  Synthetically generated peptide
PGTCGEICYACTGC

SEQ ID NO: 778 - protein, 13 aa, Artificial Sequence
  Synthetically generated peptide
PGTCGEICYACGC

SEQ ID NO: 779 - protein, 12 aa, Artificial Sequence
  Synthetically generated peptide
PGTCGEICYACC

SEQ ID NO: 780 - protein, 13 aa, Artificial Sequence
  Synthetically generated peptide
PGTCGEICYACTC

SEQ ID NO: 781 - protein, 14 aa, Artificial Sequence
  Synthetically generated peptide
PGTCGEICYAACGC

SEQ ID NO: 782 - protein, 13 aa, Artificial Sequence
  Synthetically generated peptide
PGTCGEICYAACC

SEQ ID NO: 783 - protein, 14 aa, Artificial Sequence
  Synthetically generated peptide
PGTCGEICYAACTC

SEQ ID NO: 784 - protein, 15 aa, Artificial Sequence
  Synthetically generated peptide
PGTCGEICAAACTGC

SEQ ID NO: 785 - protein, 14 aa, Artificial Sequence
  Synthetically generated peptide
PGTCGEICAACTGC

SEQ ID NO: 786 - protein, 13 aa, Artificial Sequence
  Synthetically generated peptide
PGTCGEICACTGC

SEQ ID NO: 787 - protein, 12 aa, Artificial Sequence
  Synthetically generated peptide
PGTCGEICACGC

SEQ ID NO: 788 - protein, 12 aa, Artificial Sequence
  Synthetically generated peptide
PGTCGEICACTC

SEQ ID NO: 789 - protein, 13 aa, Artificial Sequence
  Synthetically generated peptide
PGTCGEICAACGC

SEQ ID NO: 790 - protein, 12 aa, Artificial Sequence
  Synthetically generated peptide
PGTCGEICAACC

SEQ ID NO: 791 - protein, 13 aa, Artificial Sequence
  Synthetically generated peptide
PGTCGEICAACTC

SEQ ID NO: 792 - protein, 14 aa, Artificial Sequence
  Synthetically generated peptide
PGTCGEICAACTGC

SEQ ID NO: 793 - protein, 13 aa, Artificial Sequence
  Synthetically generated peptide
PGTCGEICAACGC

SEQ ID NO: 794 - protein, 12 aa, Artificial Sequence
  Synthetically generated peptide
PGTCGEICAACC

SEQ ID NO: 795 - protein, 13 aa, Artificial Sequence
  Synthetically generated peptide
PGTCGEICAACTC

SEQ ID NO: 796 - protein, 14 aa, Artificial Sequence
  Synthetically generated peptide
PGTCGEICAAACGC

SEQ ID NO: 797 - protein, 13 aa, Artificial Sequence
  Synthetically generated peptide
PGTCGEICAAACC

SEQ ID NO: 798 - protein, 14 aa, Artificial Sequence
  Synthetically generated peptide
PGTCGEICAAACTC

SEQ ID NO: 799 - protein, 15 aa, Artificial Sequence
  Synthetically generated peptide
PGTCGEICAYACTGC

SEQ ID NO: 800 - protein, 14 aa, Artificial Sequence
  Synthetically generated peptide
PGTCGEICAYCTGC

SEQ ID NO: 801 - protein, 13 aa, Artificial Sequence
  Synthetically generated peptide
PGTCGEICAYCGC

SEQ ID NO: 802 - protein, 12 aa, Artificial Sequence
  Synthetically generated peptide
PGTCGEICAYCC

SEQ ID NO: 803 - protein, 13 aa, Artificial Sequence
  Synthetically generated peptide
PGTCGEICAYCTC

SEQ ID NO: 804 - protein, 14 aa, Artificial Sequence
  Synthetically generated peptide
PGTCGEICAYACGC

SEQ ID NO: 805 - protein, 13 aa, Artificial Sequence
  Synthetically generated peptide
PGTCGEICAYACC

SEQ ID NO: 806 - protein, 14 aa, Artificial Sequence
  Synthetically generated peptide
PGTCGEICAYACTC

SEQ ID NO: 807 - protein, 15 aa, Artificial Sequence
  Synthetically generated peptide
PGTCGEICAYACTGC

SEQ ID NO: 808 - protein, 14 aa, Artificial Sequence
  Synthetically generated peptide
PGTCGEICAYACGC

SEQ ID NO: 809 - protein, 13 aa, Artificial Sequence
  Synthetically generated peptide
PGTCGEICAYACC

SEQ ID NO: 810 - protein, 14 aa, Artificial Sequence
  Synthetically generated peptide
PGTCGEICAYACTC

SEQ ID NO: 811 - protein, 15 aa, Artificial Sequence
  Synthetically generated peptide
PGTCGEICAYAACGC

SEQ ID NO: 812 - protein, 14 aa, Artificial Sequence
  Synthetically generated peptide
PGTCGEICAYAACC

SEQ ID NO: 813 - protein, 15 aa, Artificial Sequence
  Synthetically generated peptide
PGTCGEICAYAACTC

SEQ ID NO: 814 - protein, 17 aa, Artificial Sequence
  Synthetically generated peptide
  VARIANT (1)...(17): Xaa = Any Amino Acid
PGXTCGEICAYAACTGC

SEQ ID NO: 815 - protein, 18 aa, Artificial Sequence
  Synthetically generated peptide
  VARIANT (1)...(18): Xaa = Any Amino Acid
PGXXTCGEICAYAACTGC

SEQ ID NO: 816 - protein, 19 aa, Artificial Sequence
  Synthetically generated peptide
  VARIANT (1)...(19): Xaa = Any Amino Acid
PGXXXTCGEICAYAACTGC

SEQ ID NO: 817 - protein, 20 aa, Artificial Sequence
  Synthetically generated peptide
  VARIANT (1)...(20): Xaa = Any Amino Acid
PGXXXXTCGEICAYAACTGC

SEQ ID NO: 818 - protein, 20 aa, Artificial Sequence
  Synthetically generated peptide
  VARIANT (1)...(20): Xaa = Any Amino Acid
PGXXXTXCGEICAYAACTGC

SEQ ID NO: 819 - protein, 20 aa, Artificial Sequence
  Synthetically generated peptide
  VARIANT (1)...(20): Xaa = Any Amino Acid
PGXXXTCXGEICAYAACTGC

SEQ ID NO: 820 - protein, 20 aa, Artificial Sequence
  Synthetically generated peptide
  VARIANT (1)...(20): Xaa = Any Amino Acid
PGXXXTCGXEICAYAACTGC

SEQ ID NO: 821 - protein, 20 aa, Artificial Sequence
  Synthetically generated peptide
  VARIANT (1)...(20): Xaa = Any Amino Acid
PGXXXTCGEXICAYAACTGC

SEQ ID NO: 822 - protein, 20 aa, Artificial Sequence
  Synthetically generated peptide
  VARIANT (1)...(20): Xaa = Any Amino Acid
PGXXXTCGEIXCAYAACTGC

SEQ ID NO: 823 - protein, 20 aa, Artificial Sequence
  Synthetically generated peptide
  VARIANT (1)...(20): Xaa = Any Amino Acid
PGXXXTCGEICXAYAACTGC

SEQ ID NO: 824 - protein, 20 aa, Artificial Sequence
  Synthetically generated peptide
  VARIANT (1)...(20): Xaa = Any Amino Acid
PGXXXTCGEICAXYAACTGC

SEQ ID NO: 825 - protein, 20 aa, Artificial Sequence
  Synthetically generated peptide
  VARIANT (1)...(20): Xaa = Any Amino Acid
PGXXXTCGEICAYXAACTGC

SEQ ID NO: 826 - protein, 20 aa, Artificial Sequence
  Synthetically generated peptide
  VARIANT (1)...(20): Xaa = Any Amino Acid
PGXXXTCGEICAYAXACTGC

SEQ ID NO: 827 - protein, 20 aa, Artificial Sequence
  Synthetically generated peptide
  VARIANT (1)...(20): Xaa = Any Amino Acid
PGXXXTCGEICAYAAXCTGC

SEQ ID NO: 828 - protein, 20 aa, Artificial Sequence
  Synthetically generated peptide
  VARIANT (1)...(20): Xaa = Any Amino Acid
PGXXXTCGEICAYAACXTGC

SEQ ID NO: 829 - protein, 20 aa, Artificial Sequence
  Synthetically generated peptide
  VARIANT (1)...(20): Xaa = Any Amino Acid
PGXXXTCGEICAYAACTXGC

SEQ ID NO: 830 - protein, 20 aa, Artificial Sequence
  Synthetically generated peptide
  VARIANT (1)...(20): Xaa = Any Amino Acid
PGXXXTCGEICAYAACTGXC

SEQ ID NO: 831 - protein, 20 aa, Artificial Sequence
  Synthetically generated peptide
  VARIANT (1)...(20): Xaa = Any Amino Acid
PGXXXTCGEICAYAACTGCX

SEQ ID NO: 832 - protein, 19 aa, Artificial Sequence
  Synthetically generated peptide
  VARIANT (1)...(19): Xaa = Any Amino Acid
PGXXTXCGEICAYAACTGC

SEQ ID NO: 833 - protein, 20 aa, Artificial Sequence
  Synthetically generated peptide
  VARIANT (1)...(20): Xaa = Any Amino Acid
PGXXTXXCGEICAYAACTGC

SEQ ID NO: 834 - protein, 20 aa, Artificial Sequence
  Synthetically generated peptide
  VARIANT (1)...(20): Xaa = Any Amino Acid
PGXXTXCXGEICAYAACTGC

SEQ ID NO: 835 - protein, 20 aa, Artificial Sequence
  Synthetically generated peptide
  VARIANT (1)...(20): Xaa = Any Amino Acid
PGXXTXCGXEICAYAACTGC

SEQ ID NO: 836 - protein, 20 aa, Artificial Sequence
  Synthetically generated peptide
  VARIANT (1)...(20): Xaa = Any Amino Acid
PGXXTXCGEXICAYAACTGC

SEQ ID NO: 837 - protein, 20 aa, Artificial Sequence
  Synthetically generated peptide
  VARIANT (1)...(20): Xaa = Any Amino Acid
PGXXTXCGEIXCAYAACTGC

SEQ ID NO: 838 - protein, 20 aa, Artificial Sequence
  Synthetically generated peptide
  VARIANT (1)...(20): Xaa = Any Amino Acid
PGXXTXCGEICXAYAACTGC

SEQ ID NO: 839 - protein, 20 aa, Artificial Sequence
  Synthetically generated peptide
  VARIANT (1)...(20): Xaa = Any Amino Acid
PGXXTXCGEICAXYAACTGC

SEQ ID NO: 840 - protein, 20 aa, Artificial Sequence
  Synthetically generated peptide
  VARIANT (1)...(20): Xaa = Any Amino Acid
PGXXTXCGEICAYXAACTGC

SEQ ID NO: 841 - protein, 20 aa, Artificial Sequence
  Synthetically generated peptide
  VARIANT (1)...(20): Xaa = Any Amino Acid
PGXXTXCGEICAYAXACTGC

SEQ ID NO: 842 - protein, 20 aa, Artificial Sequence
  Synthetically generated peptide
  VARIANT (1)...(20): Xaa = Any Amino Acid
PGXXTXCGEICAYAAXCTGC

SEQ ID NO: 843 - protein, 20 aa, Artificial Sequence
  Synthetically generated peptide
  VARIANT (1)...(20): Xaa = Any Amino Acid
PGXXTXCGEICAYAACXTGC

SEQ ID NO: 844 - protein, 20 aa, Artificial Sequence
  Synthetically generated peptide
  VARIANT (1)...(20): Xaa = Any Amino Acid
PGXXTXCGEICAYAACTXGC

SEQ ID NO: 845 - protein, 20 aa, Artificial Sequence
  Synthetically generated peptide
  VARIANT (1)...(20): Xaa = Any Amino Acid
PGXXTXCGEICAYAACTGXC

SEQ ID NO: 846 - protein, 20 aa, Artificial Sequence
  Synthetically generated peptide
  VARIANT (1)...(20): Xaa = Any Amino Acid
PGXXTXCGEICAYAACTGCX

SEQ ID NO: 847 - protein, 19 aa, Artificial Sequence
  Synthetically generated peptide
  VARIANT (1)...(19): Xaa = Any Amino Acid
PGXXTCXGEICAYAACTGC

SEQ ID NO: 848 - protein, 20 aa, Artificial Sequence
  Synthetically generated peptide
  VARIANT (1)...(20): Xaa = Any Amino Acid
PGXXTCXXGEICAYAACTGC

SEQ ID NO: 849 - protein, 20 aa, Artificial Sequence
  Synthetically generated peptide
  VARIANT (1)...(20): Xaa = Any Amino Acid
PGXXTCXGXEICAYAACTGC

SEQ ID NO: 850 - protein, 20 aa, Artificial Sequence
  Synthetically generated peptide
  VARIANT (1)...(20): Xaa = Any Amino Acid
PGXXTCXGEXICAYAACTGC

SEQ ID NO: 851 - protein, 20 aa, Artificial Sequence
  Synthetically generated peptide
  VARIANT (1)...(20): Xaa = Any Amino Acid
PGXXTCXGEIXCAYAACTGC

SEQ ID NO: 852 - protein, 20 aa, Artificial Sequence
  Synthetically generated peptide
  VARIANT (1)...(20): Xaa = Any Amino Acid
PGXXTCXGEICXAYAACTGC

SEQ ID NO: 853 - protein, 20 aa, Artificial Sequence
  Synthetically generated peptide
  VARIANT (1)...(20): Xaa = Any Amino Acid
PGXXTCXGEICAXYAACTGC

SEQ ID NO: 854 - protein, 20 aa, Artificial Sequence
  Synthetically generated peptide
  VARIANT (1)...(20): Xaa = Any Amino Acid
PGXXTCXGEICAYXAACTGC

SEQ ID NO: 855 - protein, 20 aa, Artificial Sequence
  Synthetically generated peptide
  VARIANT (1)...(20): Xaa = Any Amino Acid
PGXXTCXGEICAYAXACTGC

SEQ ID NO: 856 - protein, 20 aa, Artificial Sequence
  Synthetically generated peptide
  VARIANT (1)...(20): Xaa = Any Amino Acid
PGXXTCXGEICAYAAXCTGC

SEQ ID NO: 857 - protein, 20 aa, Artificial Sequence
  Synthetically generated peptide
  VARIANT (1)...(20): Xaa = Any Amino Acid
PGXXTCXGEICAYAACXTGC

SEQ ID NO: 858 - protein, 20 aa, Artificial Sequence
  Synthetically generated peptide
  VARIANT (1)...(20): Xaa = Any Amino Acid
PGXXTCXGEICAYAACTXGC

SEQ ID NO: 859 - protein, 20 aa, Artificial Sequence
  Synthetically generated peptide
  VARIANT (1)...(20): Xaa = Any Amino Acid
PGXXTCXGEICAYAACTGXC

SEQ ID NO: 860 - protein, 20 aa, Artificial Sequence
  Synthetically generated peptide
  VARIANT (1)...(20): Xaa = Any Amino Acid
PGXXTCXGEICAYAACTGCX

SEQ ID NO: 861 - protein, 19 aa, Artificial Sequence
  Synthetically generated peptide
  VARIANT (1)...(19): Xaa = Any Amino Acid
PGXXTCGXEICAYAACTGC

SEQ ID NO: 862 - protein, 20 aa, Artificial Sequence
  Synthetically generated peptide
  VARIANT (1)...(20): Xaa = Any Amino Acid
PGXXTCGXXEICAYAACTGC

SEQ ID NO: 863 - protein, 20 aa, Artificial Sequence
  Synthetically generated peptide
  VARIANT (1)...(20): Xaa = Any Amino Acid
PGXXTCGXEXICAYAACTGC

SEQ ID NO: 864 - protein, 20 aa, Artificial Sequence
  Synthetically generated peptide
  VARIANT (1)...(20): Xaa = Any Amino Acid
PGXXTCGXEIXCAYAACTGC

SEQ ID NO: 865 - protein, 20 aa, Artificial Sequence
  Synthetically generated peptide
  VARIANT (1)...(20): Xaa = Any Amino Acid
PGXXTCGXEICXAYAACTGC

SEQ ID NO: 866 - protein, 20 aa, Artificial Sequence
  Synthetically generated peptide
  VARIANT (1)...(20): Xaa = Any Amino Acid
PGXXTCGXEICAXYAACTGC

SEQ ID NO: 867 - protein, 20 aa, Artificial Sequence
  Synthetically generated peptide
  VARIANT (1)...(20): Xaa = Any Amino Acid
PGXXTCGXEICAYXAACTGC

SEQ ID NO: 868 - protein, 20 aa, Artificial Sequence
  Synthetically generated peptide
  VARIANT (1)...(20): Xaa = Any Amino Acid
PGXXTCGXEICAYAXACTGC

SEQ ID NO: 869 - protein, 20 aa, Artificial Sequence
  Synthetically generated peptide
  VARIANT (1)...(20): Xaa = Any Amino Acid
PGXXTCGXEICAYAAXCTGC

SEQ ID NO: 870 - protein, 20 aa, Artificial Sequence
  Synthetically generated peptide
  VARIANT (1)...(20): Xaa = Any Amino Acid
PGXXTCGXEICAYAACXTGC

SEQ ID NO: 871 - protein, 20 aa, Artificial Sequence
  Synthetically generated peptide
  VARIANT (1)...(20): Xaa = Any Amino Acid
PGXXTCGXEICAYAACTXGC

SEQ ID NO: 872 - protein, 20 aa, Artificial Sequence
  Synthetically generated peptide
  VARIANT (1)...(20): Xaa = Any Amino Acid
PGXXTCGXEICAYAACTGXC

SEQ ID NO: 873 - protein, 20 aa, Artificial Sequence
  Synthetically generated peptide
  VARIANT (1)...(20): Xaa = Any Amino Acid
PGXXTCGXEICAYAACTGCX

SEQ ID NO: 874 - protein, 19 aa, Artificial Sequence
  Synthetically generated peptide
  VARIANT (1)...(19): Xaa = Any Amino Acid
PGXXTCGEXICAYAACTGC

SEQ ID NO: 875 - protein, 20 aa, Artificial Sequence
  Synthetically generated peptide
  VARIANT (1)...(20): Xaa = Any Amino Acid
PGXXTCGEXXICAYAACTGC

SEQ ID NO: 876 - protein, 20 aa, Artificial Sequence
  Synthetically generated peptide
  VARIANT (1)...(20): Xaa = Any Amino Acid
PGXXTCGEXIXCAYAACTGC

SEQ ID NO: 877 - protein, 20 aa, Artificial Sequence
  Synthetically generated peptide
  VARIANT (1)...(20): Xaa = Any Amino Acid
PGXXTCGEXICXAYAACTGC

SEQ ID NO: 878 - protein, 20 aa, Artificial Sequence
  Synthetically generated peptide
  VARIANT (1)...(20): Xaa = Any Amino Acid
PGXXTCGEXICAXYAACTGC

SEQ ID NO: 879 - protein, 20 aa, Artificial Sequence
  Synthetically generated peptide
  VARIANT (1)...(20): Xaa = Any Amino Acid
PGXXTCGEXICAYXAACTGC

SEQ ID NO: 880 - protein, 20 aa, Artificial Sequence
  Synthetically generated peptide
  VARIANT (1)...(20): Xaa = Any Amino Acid
PGXXTCGEXICAYAXACTGC

SEQ ID NO: 881 - protein, 20 aa, Artificial Sequence
  Synthetically generated peptide
  VARIANT (1)...(20): Xaa = Any Amino Acid
PGXXTCGEXICAYAAXCTGC

SEQ ID NO: 882 - protein, 20 aa, Artificial Sequence
  Synthetically generated peptide
  VARIANT (1)...(20): Xaa = Any Amino Acid
PGXXTCGEXICAYAACXTGC

SEQ ID NO: 883 - protein, 20 aa, Artificial Sequence
  Synthetically generated peptide
  VARIANT (1)...(20): Xaa = Any Amino Acid
PGXXTCGEXICAYAACTXGC

SEQ ID NO: 884 - protein, 20 aa, Artificial Sequence
  Synthetically generated peptide
  VARIANT (1)...(20): Xaa = Any Amino Acid
PGXXTCGEXICAYAACTGXC

SEQ ID NO: 885 - protein, 20 aa, Artificial Sequence
  Synthetically generated peptide
  VARIANT (1)...(20): Xaa = Any Amino Acid
PGXXTCGEXICAYAACTGCX

SEQ ID NO: 886 - protein, 19 aa, Artificial Sequence
  Synthetically generated peptide
  VARIANT (1)...(19): Xaa = Any Amino Acid
PGXXTCGEIXCAYAACTGC

SEQ ID NO: 887 - protein, 20 aa, Artificial Sequence
  Synthetically generated peptide
  VARIANT (1)...(20): Xaa = Any Amino Acid
PGXXTCGEIXXCAYAACTGC

SEQ ID NO: 888 - protein, 20 aa, Artificial Sequence
  Synthetically generated peptide
  VARIANT (1)...(20): Xaa = Any Amino Acid
PGXXTCGEIXCXAYAACTGC

SEQ ID NO: 889 - protein, 20 aa, Artificial Sequence
  Synthetically generated peptide
  VARIANT (1)...(20): Xaa = Any Amino Acid
PGXXTCGEIXCAXYAACTGC

SEQ ID NO: 890 - protein, 20 aa, Artificial Sequence
  Synthetically generated peptide
  VARIANT (1)...(20): Xaa = Any Amino Acid
PGXXTCGEIXCAYXAACTGC

SEQ ID NO: 891 - protein, 20 aa, Artificial Sequence
  Synthetically generated peptide
  VARIANT (1)...(20): Xaa = Any Amino Acid
PGXXTCGEIXCAYAXACTGC

SEQ ID NO: 892 - protein, 20 aa, Artificial Sequence
  Synthetically generated peptide
  VARIANT (1)...(20): Xaa = Any Amino Acid
PGXXTCGEIXCAYAAXCTGC

SEQ ID NO: 893 - protein, 20 aa, Artificial Sequence
  Synthetically generated peptide
  VARIANT (1)...(20): Xaa = Any Amino Acid
PGXXTCGEIXCAYAACXTGC

SEQ ID NO: 894 - protein, 20 aa, Artificial Sequence
  Synthetically generated peptide
  VARIANT (1)...(20): Xaa = Any Amino Acid
PGXXTCGEIXCAYAACTXGC

SEQ ID NO: 895 - protein, 20 aa, Artificial Sequence
  Synthetically generated peptide
  VARIANT (1)...(20): Xaa = Any Amino Acid
PGXXTCGEIXCAYAACTGXC

SEQ ID NO: 896 - protein, 20 aa, Artificial Sequence
  Synthetically generated peptide
  VARIANT (1)...(20): Xaa = Any Amino Acid
PGXXTCGEIXCAYAACTGCX

SEQ ID NO: 897 - protein, 19 aa, Artificial Sequence
  Synthetically generated peptide
  VARIANT (1)...(19): Xaa = Any Amino Acid
PGXXTCGEICXAYAACTGC

SEQ ID NO: 898 - protein, 20 aa, Artificial Sequence
  Synthetically generated peptide
  VARIANT (1)...(20): Xaa = Any Amino Acid
PGXXTCGEICXXAYAACTGC

SEQ ID NO: 899 - protein, 20 aa, Artificial Sequence
  Synthetically generated peptide
  VARIANT (1)...(20): Xaa = Any Amino Acid
PGXXTCGEICXAXYAACTGC

SEQ ID NO: 900 - protein, 20 aa, Artificial Sequence
  Synthetically generated peptide
  VARIANT (1)...(20): Xaa = Any Amino Acid
PGXXTCGEICXAYXAACTGC

SEQ ID NO: 901 - protein, 20 aa, Artificial Sequence
  Synthetically generated peptide
  VARIANT (1)...(20): Xaa = Any Amino Acid
PGXXTCGEICXAYAXACTGC

SEQ ID NO: 902 - protein, 20 aa, Artificial Sequence
  Synthetically generated peptide
  VARIANT (1)...(20): Xaa = Any Amino Acid
PGXXTCGEICXAYAAXCTGC

SEQ ID NO: 903 - protein, 20 aa, Artificial Sequence
  Synthetically generated peptide
  VARIANT (1)...(20): Xaa = Any Amino Acid
PGXXTCGEICXAYAACXTGC

SEQ ID NO: 904 - protein, 20 aa, Artificial Sequence
  Synthetically generated peptide
  VARIANT (1)...(20): Xaa = Any Amino Acid
PGXXTCGEICXAYAACTXGC

SEQ ID NO: 905 - protein, 20 aa, Artificial Sequence
  Synthetically generated peptide
  VARIANT (1)...(20): Xaa = Any Amino Acid
PGXXTCGEICXAYAACTGXC

SEQ ID NO: 906 - protein, 20 aa, Artificial Sequence
  Synthetically generated peptide
  VARIANT (1)...(20): Xaa = Any Amino Acid
PGXXTCGEICXAYAACTGCX

SEQ ID NO: 907 - protein, 19 aa, Artificial Sequence
  Synthetically generated peptide
  VARIANT (1)...(19): Xaa = Any Amino Acid
PGXXTCGEICAXYAACTGC

SEQ ID NO: 908 - protein, 20 aa, Artificial Sequence
  Synthetically generated peptide
  VARIANT (1)...(20): Xaa = Any Amino Acid
PGXXTCGEICAXXYAACTGC

SEQ ID NO: 909 - protein, 20 aa, Artificial Sequence
  Synthetically generated peptide
  VARIANT (1)...(20): Xaa = Any Amino Acid
PGXXTCGEICAXYXAACTGC

SEQ ID NO: 910 - protein, 20 aa, Artificial Sequence
  Synthetically generated peptide
  VARIANT (1)...(20): Xaa = Any Amino Acid
PGXXTCGEICAXYAXACTGC

SEQ ID NO: 911 - protein, 20 aa, Artificial Sequence
  Synthetically generated peptide
  VARIANT (1)...(20): Xaa = Any Amino Acid
PGXXTCGEICAXYAAXCTGC

SEQ ID NO: 912 - protein, 20 aa, Artificial Sequence
  Synthetically generated peptide
  VARIANT (1)...(20): Xaa = Any Amino Acid
PGXXTCGEICAXYAACXTGC

SEQ ID NO: 913 - protein, 20 aa, Artificial Sequence
  Synthetically generated peptide
  VARIANT (1)...(20): Xaa = Any Amino Acid
PGXXTCGEICAXYAACTXGC

SEQ ID NO: 914 - protein, 20 aa, Artificial Sequence
  Synthetically generated peptide
  VARIANT (1)...(20): Xaa = Any Amino Acid
PGXXTCGEICAXYAACTGXC

SEQ ID NO: 915 - protein, 20 aa, Artificial Sequence
  Synthetically generated peptide
  VARIANT (1)...(20): Xaa = Any Amino Acid
PGXXTCGEICAXYAACTGCX

SEQ ID NO: 916 - protein, 19 aa, Artificial Sequence
  Synthetically generated peptide
  VARIANT (1)...(19): Xaa = Any Amino Acid
PGXXTCGEICAYXAACTGC

SEQ ID NO: 917 - protein, 20 aa, Artificial Sequence
  Synthetically generated peptide
  VARIANT (1)...(20): Xaa = Any Amino Acid
PGXXTCGEICAYXXAACTGC

SEQ ID NO: 918 - protein, 20 aa, Artificial Sequence
  Synthetically generated peptide
  VARIANT (1)...(20): Xaa = Any Amino Acid
PGXXTCGEICAYXAXACTGC

SEQ ID NO: 919 - protein, 20 aa, Artificial Sequence
  Synthetically generated peptide
  VARIANT (1)...(20): Xaa = Any Amino Acid
PGXXTCGEICAYXAAXCTGC

SEQ ID NO: 920 - protein, 20 aa, Artificial Sequence
  Synthetically generated peptide
  VARIANT (1)...(20): Xaa = Any Amino Acid
PGXXTCGEICAYXAACXTGC

SEQ ID NO: 921 - protein, 20 aa, Artificial Sequence
  Synthetically generated peptide
  VARIANT (1)...(20): Xaa = Any Amino Acid
PGXXTCGEICAYXAACTXGC

SEQ ID NO: 922 - protein, 20 aa, Artificial Sequence
  Synthetically generated peptide
  VARIANT (1)...(20): Xaa = Any Amino Acid
PGXXTCGEICAYXAACTGXC

SEQ ID NO: 923 - protein, 20 aa, Artificial Sequence
  Synthetically generated peptide
  VARIANT (1)...(20): Xaa = Any Amino Acid
PGXXTCGEICAYXAACTGCX

SEQ ID NO: 924 - protein, 19 aa, Artificial Sequence
  Synthetically generated peptide
  VARIANT (1)...(19): Xaa = Any Amino Acid
PGXXTCGEICAYAXACTGC

SEQ ID NO: 925 - protein, 20 aa, Artificial Sequence
  Synthetically generated peptide
  VARIANT (1)...(20): Xaa = Any Amino Acid
PGXXTCGEICAYAXXACTGC

SEQ ID NO: 926 - protein, 20 aa, Artificial Sequence
  Synthetically generated peptide
  VARIANT (1)...(20): Xaa = Any Amino Acid
PGXXTCGEICAYAXAXCTGC

SEQ ID NO: 927 - protein, 20 aa, Artificial Sequence
  Synthetically generated peptide
  VARIANT (1)...(20): Xaa = Any Amino Acid
PGXXTCGEICAYAXACXTGC

SEQ ID NO: 928 - protein, 20 aa, Artificial Sequence
  Synthetically generated peptide
  VARIANT (1)...(20): Xaa = Any Amino Acid
PGXXTCGEICAYAXACTXGC

SEQ ID NO: 929 - protein, 20 aa, Artificial Sequence
  Synthetically generated peptide
  VARIANT (1)...(20): Xaa = Any Amino Acid
PGXXTCGEICAYAXACTGXC

SEQ ID NO: 930 - protein, 20 aa, Artificial Sequence
  Synthetically generated peptide
  VARIANT (1)...(20): Xaa = Any Amino Acid
PGXXTCGEICAYAXACTGCX

SEQ ID NO: 931 - protein, 19 aa, Artificial Sequence
  Synthetically generated peptide
  VARIANT (1)...(19): Xaa = Any Amino Acid
PGXXTCGEICAYAAXCTGC

SEQ ID NO: 932 - protein, 20 aa, Artificial Sequence
  Synthetically generated peptide
  VARIANT (1)...(20): Xaa = Any Amino Acid
PGXXTCGEICAYAAXXCTGC

SEQ ID NO: 933 - protein, 20 aa, Artificial Sequence
  Synthetically generated peptide
  VARIANT (1)...(20): Xaa = Any Amino Acid
PGXXTCGEICAYAAXCXTGC

SEQ ID NO: 934 - protein, 20 aa, Artificial Sequence
  Synthetically generated peptide
  VARIANT (1)...(20): Xaa = Any Amino Acid
PGXXTCGEICAYAAXCTXGC

SEQ ID NO: 935 - protein, 20 aa, Artificial Sequence
  Synthetically generated peptide
  VARIANT (1)...(20): Xaa = Any Amino Acid
PGXXTCGEICAYAAXCTGXC

SEQ ID NO: 936 - protein, 20 aa, Artificial Sequence
  Synthetically generated peptide
  VARIANT (1)...(20): Xaa = Any Amino Acid
PGXXTCGEICAYAAXCTGCX

SEQ ID NO: 937 - protein, 19 aa, Artificial Sequence
  Synthetically generated peptide
  VARIANT (1)...(19): Xaa = Any Amino Acid
PGXXTCGEICAYAACXTGC

SEQ ID NO: 938 - protein, 20 aa, Artificial Sequence
  Synthetically generated peptide
  VARIANT (1)...(20): Xaa = Any Amino Acid
PGXXTCGEICAYAACXXTGC

SEQ ID NO: 939 - protein, 20 aa, Artificial Sequence
  Synthetically generated peptide
  VARIANT (1)...(20): Xaa = Any Amino Acid
PGXXTCGEICAYAACXTXGC

SEQ ID NO: 940 - protein, 20 aa, Artificial Sequence
  Synthetically generated peptide
  VARIANT (1)...(20): Xaa = Any Amino Acid
PGXXTCGEICAYAACXTGXC

SEQ ID NO: 941 - protein, 20 aa, Artificial Sequence
  Synthetically generated peptide
  VARIANT (1)...(20): Xaa = Any Amino Acid
PGXXTCGEICAYAACXTGCX

SEQ ID NO: 942 - protein, 19 aa, Artificial Sequence
  Synthetically generated peptide
  VARIANT (1)...(19): Xaa = Any Amino Acid
PGXXTCGEICAYAACTXGC

SEQ ID NO: 943 - protein, 20 aa, Artificial Sequence
  Synthetically generated peptide
  VARIANT (1)...(20): Xaa = Any Amino Acid
PGXXTCGEICAYAACTXXGC

SEQ ID NO: 944 - protein, 20 aa, Artificial Sequence
  Synthetically generated peptide
  VARIANT (1)...(20): Xaa = Any Amino Acid
PGXXTCGEICAYAACTXGXC

SEQ ID NO: 945 - protein, 20 aa, Artificial Sequence
  Synthetically generated peptide
  VARIANT (1)...(20): Xaa = Any Amino Acid
PGXXTCGEICAYAACTXGCX

SEQ ID NO: 946 - protein, 19 aa, Artificial Sequence
  Synthetically generated peptide
  VARIANT (1)...(19): Xaa = Any Amino Acid
PGXXTCGEICAYAACTGXC

SEQ ID NO: 947 - protein, 20 aa, Artificial Sequence
  Synthetically generated peptide
  VARIANT (1)...(20): Xaa = Any Amino Acid
PGXXTCGEICAYAACTGXXC

SEQ ID NO: 948 - protein, 20 aa, Artificial Sequence
  Synthetically generated peptide
  VARIANT (1)...(20): Xaa = Any Amino Acid
PGXXTCGEICAYAACTGXCX

SEQ ID NO: 949 - protein, 19 aa, Artificial Sequence
  Synthetically generated peptide
  VARIANT (1)...(19): Xaa = Any Amino Acid
PGXXTCGEICAYAACTGCX

SEQ ID NO: 950 - protein, 20 aa, Artificial Sequence
  Synthetically generated peptide
  VARIANT (1)...(20): Xaa = Any Amino Acid
PGXXTCGEICAYAACTGCXX

SEQ ID NO: 951 - protein, 18 aa, Artificial Sequence
  Synthetically generated peptide
  VARIANT (1)...(18): Xaa = Any Amino Acid
PGXTXCGEICAYAACTGC

SEQ ID NO: 952 - protein, 19 aa, Artificial Sequence
  Synthetically generated peptide
  VARIANT (1)...(19): Xaa = Any Amino Acid
PGXTXXCGEICAYAACTGC

SEQ ID NO: 953 - protein, 20 aa, Artificial Sequence
  Synthetically generated peptide
  VARIANT (1)...(20): Xaa = Any Amino Acid
PGXTXXXCGEICAYAACTGC

SEQ ID NO: 954 - protein, 20 aa, Artificial Sequence
  Synthetically generated peptide
  VARIANT (1)...(20): Xaa = Any Amino Acid
PGXTXXCXGEICAYAACTGC

SEQ ID NO: 955 - protein, 20 aa, Artificial Sequence
  Synthetically generated peptide
  VARIANT (1)...(20): Xaa = Any Amino Acid
PGXTXXCGXEICAYAACTGC

SEQ ID NO: 956 - protein, 20 aa, Artificial Sequence
  Synthetically generated peptide
  VARIANT (1)...(20): Xaa = Any Amino Acid
PGXTXXCGEXICAYAACTGC

SEQ ID NO: 957 - protein, 20 aa, Artificial Sequence
  Synthetically generated peptide
  VARIANT (1)...(20): Xaa = Any Amino Acid
PGXTXXCGEIXCAYAACTGC

SEQ ID NO: 958 - protein, 20 aa, Artificial Sequence
  Synthetically generated peptide
  VARIANT (1)...(20): Xaa = Any Amino Acid
PGXTXXCGEICXAYAACTGC

SEQ ID NO: 959 - protein, 20 aa, Artificial Sequence
  Synthetically generated peptide
  VARIANT (1)...(20): Xaa = Any Amino Acid
PGXTXXCGEICAXYAACTGC

SEQ ID NO: 960 - protein, 20 aa, Artificial Sequence
  Synthetically generated peptide
  VARIANT (1)...(20): Xaa = Any Amino Acid
PGXTXXCGEICAYXAACTGC

SEQ ID NO: 961 - protein, 20 aa, Artificial Sequence
  Synthetically generated peptide
  VARIANT (1)...(20): Xaa = Any Amino Acid
PGXTXXCGEICAYAXACTGC

SEQ ID NO: 962 - protein, 20 aa, Artificial Sequence
  Synthetically generated peptide
  VARIANT (1)...(20): Xaa = Any Amino Acid
PGXTXXCGEICAYAAXCTGC

SEQ ID NO: 963 - protein, 20 aa, Artificial Sequence
  Synthetically generated peptide
  VARIANT (1)...(20): Xaa = Any Amino Acid
PGXTXXCGEICAYAACXTGC

SEQ ID NO: 964 - protein, 20 aa, Artificial Sequence
  Synthetically generated peptide
  VARIANT (1)...(20): Xaa = Any Amino Acid
PGXTXXCGEICAYAACTXGC

SEQ ID NO: 965 - protein, 20 aa, Artificial Sequence
  Synthetically generated peptide
  VARIANT (1)...(20): Xaa = Any Amino Acid
PGXTXXCGEICAYAACTGXC

SEQ ID NO: 966 - protein, 20 aa, Artificial Sequence
  Synthetically generated peptide
  VARIANT (1)...(20): Xaa = Any Amino Acid
PGXTXXCGEICAYAACTGCX

SEQ ID NO: 967 - protein, 19 aa, Artificial Sequence
  Synthetically generated peptide
  VARIANT (1)...(19): Xaa = Any Amino Acid
PGXTXCXGEICAYAACTGC

SEQ ID NO: 968 - protein, 20 aa, Artificial Sequence
  Synthetically generated peptide
  VARIANT (1)...(20): Xaa = Any Amino Acid
PGXTXCXXGEICAYAACTGC

SEQ ID NO: 969 - protein, 20 aa, Artificial Sequence
  Synthetically generated peptide
  VARIANT (1)...(20): Xaa = Any Amino Acid
PGXTXCXGXEICAYAACTGC

SEQ ID NO: 970 - protein, 20 aa, Artificial Sequence
  Synthetically generated peptide
  VARIANT (1)...(20): Xaa = Any Amino Acid
PGXTXCXGEXICAYAACTGC

SEQ ID NO: 971 - protein, 20 aa, Artificial Sequence
  Synthetically generated peptide
  VARIANT (1)...(20): Xaa = Any Amino Acid
PGXTXCXGEIXCAYAACTGC

SEQ ID NO: 972 - protein, 20 aa, Artificial Sequence
  Synthetically generated peptide
  VARIANT (1)...(20): Xaa = Any Amino Acid
PGXTXCXGEICXAYAACTGC

SEQ ID NO: 973 - protein, 20 aa, Artificial Sequence
  Synthetically generated peptide
  VARIANT (1)...(20): Xaa = Any Amino Acid
PGXTXCXGEICAXYAACTGC

SEQ ID NO: 974 - protein, 20 aa, Artificial Sequence
  Synthetically generated peptide
  VARIANT (1)...(20): Xaa = Any Amino Acid
PGXTXCXGEICAYXAACTGC

SEQ ID NO: 975 - protein, 20 aa, Artificial Sequence
  Synthetically generated peptide
  VARIANT (1)...(20): Xaa = Any Amino Acid
PGXTXCXGEICAYAXACTGC

SEQ ID NO: 976 - protein, 20 aa, Artificial Sequence
  Synthetically generated peptide
  VARIANT (1)...(20): Xaa = Any Amino Acid
PGXTXCXGEICAYAAXCTGC

SEQ ID NO: 977 - protein, 20 aa, Artificial Sequence
  Synthetically generated peptide
  VARIANT (1)...(20): Xaa = Any Amino Acid
PGXTXCXGEICAYAACXTGC

SEQ ID NO: 978 - protein, 20 aa, Artificial Sequence
  Synthetically generated peptide
  VARIANT (1)...(20): Xaa = Any Amino Acid
PGXTXCXGEICAYAACTXGC

SEQ ID NO: 979 - protein, 20 aa, Artificial Sequence
  Synthetically generated peptide
  VARIANT (1)...(20): Xaa = Any Amino Acid
PGXTXCXGEICAYAACTGXC

SEQ ID NO: 980 - protein, 20 aa, Artificial Sequence
  Synthetically generated peptide
  VARIANT (1)...(20): Xaa = Any Amino Acid
PGXTXCXGEICAYAACTGCX

SEQ ID NO: 981 - protein, 19 aa, Artificial Sequence
  Synthetically generated peptide
  VARIANT (1)...(19): Xaa = Any Amino Acid
PGXTXCGXEICAYAACTGC

SEQ ID NO: 982 - protein, 20 aa, Artificial Sequence
  Synthetically generated peptide
  VARIANT (1)...(20): Xaa = Any Amino Acid
PGXTXCGXXEICAYAACTGC

SEQ ID NO: 983 - protein, 20 aa, Artificial Sequence
  Synthetically generated peptide
  VARIANT (1)...(20): Xaa = Any Amino Acid
PGXTXCGXEXICAYAACTGC

SEQ ID NO: 984 - protein, 20 aa, Artificial Sequence
  Synthetically generated peptide
  VARIANT (1)...(20): Xaa = Any Amino Acid
PGXTXCGXEIXCAYAACTGC

SEQ ID NO: 985 - protein, 20 aa, Artificial Sequence
  Synthetically generated peptide
  VARIANT (1)...(20): Xaa = Any Amino Acid
PGXTXCGXEICXAYAACTGC

SEQ ID NO: 986 - protein, 20 aa, Artificial Sequence
  Synthetically generated peptide
  VARIANT (1)...(20): Xaa = Any Amino Acid
PGXTXCGXEICAXYAACTGC

SEQ ID NO: 987 - protein, 20 aa, Artificial Sequence
  Synthetically generated peptide
  VARIANT (1)...(20): Xaa = Any Amino Acid
PGXTXCGXEICAYXAACTGC

SEQ ID NO: 988 - protein, 20 aa, Artificial Sequence
  Synthetically generated peptide
  VARIANT (1)...(20): Xaa = Any Amino Acid
PGXTXCGXEICAYAXACTGC

SEQ ID NO: 989 - protein, 20 aa, Artificial Sequence
  Synthetically generated peptide
  VARIANT (1)...(20): Xaa = Any Amino Acid
PGXTXCGXEICAYAAXCTGC

SEQ ID NO: 990 - protein, 20 aa, Artificial Sequence
  Synthetically generated peptide
  VARIANT (1)...(20): Xaa = Any Amino Acid
PGXTXCGXEICAYAACXTGC

SEQ ID NO: 991 - protein, 20 aa, Artificial Sequence
  Synthetically generated peptide
  VARIANT (1)...(20): Xaa = Any Amino Acid
PGXTXCGXEICAYAACTXGC

SEQ ID NO: 992 - protein, 20 aa, Artificial Sequence
  Synthetically generated peptide
  VARIANT (1)...(20): Xaa = Any Amino Acid
PGXTXCGXEICAYAACTGXC

SEQ ID NO: 993 - protein, 20 aa, Artificial Sequence
  Synthetically generated peptide
  VARIANT (1)...(20): Xaa = Any Amino Acid
PGXTXCGXEICAYAACTGCX

SEQ ID NO: 994 - protein, 19 aa, Artificial Sequence
  Synthetically generated peptide
  VARIANT (1)...(19): Xaa = Any Amino Acid
PGXTXCGEXICAYAACTGC

SEQ ID NO: 995 - protein, 20 aa, Artificial Sequence
  Synthetically generated peptide
  VARIANT (1)...(20): Xaa = Any Amino Acid
PGXTXCGEXXICAYAACTGC

SEQ ID NO: 996 - protein, 20 aa, Artificial Sequence
  Synthetically generated peptide
  VARIANT (1)...(20): Xaa = Any Amino Acid
PGXTXCGEXIXCAYAACTGC

SEQ ID NO: 997 - protein, 20 aa, Artificial Sequence
  Synthetically generated peptide
  VARIANT (1)...(20): Xaa = Any Amino Acid
PGXTXCGEXICXAYAACTGC

SEQ ID NO: 998 - protein, 20 aa, Artificial Sequence
  Synthetically generated peptide
  VARIANT (1)...(20): Xaa = Any Amino Acid
PGXTXCGEXICAXYAACTGC

SEQ ID NO: 999 - protein, 20 aa, Artificial Sequence
  Synthetically generated peptide
  VARIANT (1)...(20): Xaa = Any Amino Acid
PGXTXCGEXICAYXAACTGC

SEQ ID NO: 1000 - protein, 20 aa, Artificial Sequence
  Synthetically generated peptide
  VARIANT (1)...(20): Xaa = Any Amino Acid
PGXTXCGEXICAYAXACTGC

SEQ ID NO: 1001 - protein, 20 aa, Artificial Sequence
  Synthetically generated peptide
  VARIANT (1)...(20): Xaa = Any Amino Acid
PGXTXCGEXICAYAAXCTGC

SEQ ID NO: 1002 - protein, 20 aa, Artificial Sequence
  Synthetically generated peptide
  VARIANT (1)...(20): Xaa = Any Amino Acid
PGXTXCGEXICAYAACXTGC

SEQ ID NO: 1003 - protein, 20 aa, Artificial Sequence
  Synthetically generated peptide
  VARIANT (1)...(20): Xaa = Any Amino Acid
PGXTXCGEXICAYAACTXGC

SEQ ID NO: 1004 - protein, 20 aa, Artificial Sequence
  Synthetically generated peptide
  VARIANT (1)...(20): Xaa = Any Amino Acid
PGXTXCGEXICAYAACTGXC

SEQ ID NO: 1005 - protein, 20 aa, Artificial Sequence
  Synthetically generated peptide
  VARIANT (1)...(20): Xaa = Any Amino Acid
PGXTXCGEXICAYAACTGCX

SEQ ID NO: 1006 - protein, 19 aa, Artificial Sequence
  Synthetically generated peptide
  VARIANT (1)...(19): Xaa = Any Amino Acid
PGXTXCGEIXCAYAACTGC

SEQ ID NO: 1007 - protein, 20 aa, Artificial Sequence
  Synthetically generated peptide
  VARIANT (1)...(20): Xaa = Any Amino Acid
PGXTXCGEIXXCAYAACTGC

SEQ ID NO: 1008 - protein, 20 aa, Artificial Sequence
  Synthetically generated peptide
  VARIANT (1)...(20): Xaa = Any Amino Acid
PGXTXCGEIXCXAYAACTGC

SEQ ID NO: 1009 - protein, 20 aa, Artificial Sequence
  Synthetically generated peptide
  VARIANT (1)...(20): Xaa = Any Amino Acid
PGXTXCGEIXCAXYAACTGC

SEQ ID NO: 1010 - protein, 20 aa, Artificial Sequence
  Synthetically generated peptide
  VARIANT (1)...(20): Xaa = Any Amino Acid
PGXTXCGEIXCAYXAACTGC

SEQ ID NO: 1011 - protein, 20 aa, Artificial Sequence
  Synthetically generated peptide
  VARIANT (1)...(20): Xaa = Any Amino Acid
PGXTXCGEIXCAYAXACTGC

SEQ ID NO: 1012 - protein, 20 aa, Artificial Sequence
  Synthetically generated peptide
  VARIANT (1)...(20): Xaa = Any Amino Acid
PGXTXCGEIXCAYAAXCTGC

SEQ ID NO: 1013 - protein, 20 aa, Artificial Sequence
  Synthetically generated peptide
  VARIANT (1)...(20): Xaa = Any Amino Acid
PGXTXCGEIXCAYAACXTGC

SEQ ID NO: 1014 - protein, 20 aa, Artificial Sequence
  Synthetically generated peptide
  VARIANT (1)...(20): Xaa = Any Amino Acid
PGXTXCGEIXCAYAACTXGC

SEQ ID NO: 1015 - protein, 20 aa, Artificial Sequence
  Synthetically generated peptide
  VARIANT (1)...(20): Xaa = Any Amino Acid
PGXTXCGEIXCAYAACTGXC

SEQ ID NO: 1016 - protein, 20 aa, Artificial Sequence
  Synthetically generated peptide
  VARIANT (1)...(20): Xaa = Any Amino Acid
PGXTXCGEIXCAYAACTGCX

SEQ ID NO: 1017 - protein, 19 aa, Artificial Sequence
  Synthetically generated peptide
  VARIANT (1)...(19): Xaa = Any Amino Acid
PGXTXCGEICXAYAACTGC

SEQ ID NO: 1018 - protein, 20 aa, Artificial Sequence
  Synthetically generated peptide
  VARIANT (1)...(20): Xaa = Any Amino Acid
PGXTXCGEICXXAYAACTGC

SEQ ID NO: 1019 - protein, 20 aa, Artificial Sequence
  Synthetically generated peptide
  VARIANT (1)...(20): Xaa = Any Amino Acid
PGXTXCGEICXAXYAACTGC

SEQ ID NO: 1020 - protein, 20 aa, Artificial Sequence
  Synthetically generated peptide
  VARIANT (1)...(20): Xaa = Any Amino Acid
PGXTXCGEICXAYXAACTGC

SEQ ID NO: 1021 - protein, 20 aa, Artificial Sequence
  Synthetically generated peptide
  VARIANT (1)...(20): Xaa = Any Amino Acid
PGXTXCGEICXAYAXACTGC

SEQ ID NO: 1022 - protein, 20 aa, Artificial Sequence
  Synthetically generated peptide
  VARIANT (1)...(20): Xaa = Any Amino Acid
PGXTXCGEICXAYAAXCTGC

SEQ ID NO: 1023 - protein, 20 aa, Artificial Sequence
  Synthetically generated peptide
  VARIANT (1)...(20): Xaa = Any Amino Acid
PGXTXCGEICXAYAACXTGC

SEQ ID NO: 1024 - protein, 20 aa, Artificial Sequence
  Synthetically generated peptide
  VARIANT (1)...(20): Xaa = Any Amino Acid
PGXTXCGEICXAYAACTXGC

SEQ ID NO: 1025 - protein, 20 aa, Artificial Sequence
  Synthetically generated peptide
  VARIANT (1)...(20): Xaa = Any Amino Acid
PGXTXCGEICXAYAACTGXC

SEQ ID NO: 1026 - protein, 20 aa, Artificial Sequence
  Synthetically generated peptide
  VARIANT (1)...(20): Xaa = Any Amino Acid
PGXTXCGEICXAYAACTGCX

SEQ ID NO: 1027 - protein, 19 aa, Artificial Sequence
  Synthetically generated peptide
  VARIANT (1)...(19): Xaa = Any Amino Acid
PGXTXCGEICAXYAACTGC

SEQ ID NO: 1028 - protein, 20 aa, Artificial Sequence
  Synthetically generated peptide
  VARIANT (1)...(20): Xaa = Any Amino Acid
PGXTXCGEICAXXYAACTGC

SEQ ID NO: 1029 - protein, 20 aa, Artificial Sequence
  Synthetically generated peptide
  VARIANT (1)...(20): Xaa = Any Amino Acid
PGXTXCGEICAXYXAACTGC

SEQ ID NO: 1030 - protein, 20 aa, Artificial Sequence
  Synthetically generated peptide
  VARIANT (1)...(20): Xaa = Any Amino Acid
PGXTXCGEICAXYAXACTGC

SEQ ID NO: 1031 - protein, 20 aa, Artificial Sequence
  Synthetically generated peptide
  VARIANT (1)...(20): Xaa = Any Amino Acid
PGXTXCGEICAXYAAXCTGC

SEQ ID NO: 1032 - protein, 20 aa, Artificial Sequence
  Synthetically generated peptide
  VARIANT (1)...(20): Xaa = Any Amino Acid
PGXTXCGEICAXYAACXTGC

SEQ ID NO: 1033 - protein, 20 aa, Artificial Sequence
  Synthetically generated peptide
  VARIANT (1)...(20): Xaa = Any Amino Acid
PGXTXCGEICAXYAACTXGC

SEQ ID NO: 1034 - protein, 20 aa, Artificial Sequence
  Synthetically generated peptide
  VARIANT (1)...(20): Xaa = Any Amino Acid
PGXTXCGEICAXYAACTGXC

SEQ ID NO: 1035 - protein, 20 aa, Artificial Sequence
  Synthetically generated peptide
  VARIANT (1)...(20): Xaa = Any Amino Acid
PGXTXCGEICAXYAACTGCX

SEQ ID NO: 1036 - protein, 19 aa, Artificial Sequence
  Synthetically generated peptide
  VARIANT (1)...(19): Xaa = Any Amino Acid
PGXTXCGEICAYXAACTGC

SEQ ID NO: 1037 - protein, 20 aa, Artificial Sequence
  Synthetically generated peptide
  VARIANT (1)...(20): Xaa = Any Amino Acid
PGXTXCGEICAYXXAACTGC

SEQ ID NO: 1038 - protein, 20 aa, Artificial Sequence
  Synthetically generated peptide
  VARIANT (1)...(20): Xaa = Any Amino Acid
PGXTXCGEICAYXAXACTGC

SEQ ID NO: 1039 - protein, 20 aa, Artificial Sequence
  Synthetically generated peptide
  VARIANT (1)...(20): Xaa = Any Amino Acid
PGXTXCGEICAYXAAXCTGC

SEQ ID NO: 1040 - protein, 20 aa, Artificial Sequence
  Synthetically generated peptide
  VARIANT (1)...(20): Xaa = Any Amino Acid
PGXTXCGEICAYXAACXTGC

SEQ ID NO: 1041 - protein, 20 aa, Artificial Sequence
  Synthetically generated peptide
  VARIANT (1)...(20): Xaa = Any Amino Acid
PGXTXCGEICAYXAACTXGC

SEQ ID NO: 1042 - protein, 20 aa, Artificial Sequence
  Synthetically generated peptide
  VARIANT (1)...(20): Xaa = Any Amino Acid
PGXTXCGEICAYXAACTGXC

SEQ ID NO: 1043 - protein, 20 aa, Artificial Sequence
  Synthetically generated peptide
  VARIANT (1)...(20): Xaa = Any Amino Acid
PGXTXCGEICAYXAACTGCX

SEQ ID NO: 1044 - protein, 19 aa, Artificial Sequence
  Synthetically generated peptide
  VARIANT (1)...(19): Xaa = Any Amino Acid
PGXTXCGEICAYAXACTGC

SEQ ID NO: 1045 - protein, 20 aa, Artificial Sequence
  Synthetically generated peptide
  VARIANT (1)...(20): Xaa = Any Amino Acid
PGXTXCGEICAYAXXACTGC

SEQ ID NO: 1046 - protein, 20 aa, Artificial Sequence
  Synthetically generated peptide
  VARIANT (1)...(20): Xaa = Any Amino Acid
PGXTXCGEICAYAXAXCTGC

SEQ ID NO: 1047 - protein, 20 aa, Artificial Sequence
  Synthetically generated peptide
  VARIANT (1)...(20): Xaa = Any Amino Acid
PGXTXCGEICAYAXACXTGC

SEQ ID NO: 1048 - protein, 20 aa, Artificial Sequence
  Synthetically generated peptide
  VARIANT (1)...(20): Xaa = Any Amino Acid
PGXTXCGEICAYAXACTXGC

SEQ ID NO: 1049 - protein, 20 aa, Artificial Sequence
  Synthetically generated peptide
  VARIANT (1)...(20): Xaa = Any Amino Acid
PGXTXCGEICAYAXACTGXC

SEQ ID NO: 1050 - protein, 20 aa, Artificial Sequence
  Synthetically generated peptide
  VARIANT (1)...(20): Xaa = Any Amino Acid
PGXTXCGEICAYAXACTGCX

SEQ ID NO: 1051 - protein, 19 aa, Artificial Sequence
  Synthetically generated peptide
  VARIANT (1)...(19): Xaa = Any Amino Acid
PGXTXCGEICAYAAXCTGC

SEQ ID NO: 1052 - protein, 20 aa, Artificial Sequence
  Synthetically generated peptide
  VARIANT (1)...(20): Xaa = Any Amino Acid
PGXTXCGEICAYAAXXCTGC

SEQ ID NO: 1053 - protein, 20 aa, Artificial Sequence
  Synthetically generated peptide
  VARIANT (1)...(20): Xaa = Any Amino Acid
PGXTXCGEICAYAAXCXTGC

SEQ ID NO: 1054 - protein, 20 aa, Artificial Sequence
  Synthetically generated peptide
  VARIANT (1)...(20): Xaa = Any Amino Acid
PGXTXCGEICAYAAXCTXGC

SEQ ID NO: 1055 - protein, 20 aa, Artificial Sequence
  Synthetically generated peptide
  VARIANT (1)...(20): Xaa = Any Amino Acid
PGXTXCGEICAYAAXCTGXC

SEQ ID NO: 1056 - protein, 20 aa, Artificial Sequence
  Synthetically generated peptide
  VARIANT (1)...(20): Xaa = Any Amino Acid
PGXTXCGEICAYAAXCTGCX

SEQ ID NO: 1057 - protein, 19 aa, Artificial Sequence
  Synthetically generated peptide
  VARIANT (1)...(19): Xaa = Any Amino Acid
PGXTXCGEICAYAACXTGC

SEQ ID NO: 1058 - protein, 20 aa, Artificial Sequence
  Synthetically generated peptide
  VARIANT (1)...(20): Xaa = Any Amino Acid
PGXTXCGEICAYAACXXTGC

SEQ ID NO: 1059 - protein, 20 aa, Artificial Sequence
  Synthetically generated peptide
  VARIANT (1)...(20): Xaa = Any Amino Acid
PGXTXCGEICAYAACXTXGC

SEQ ID NO: 1060 - protein, 20 aa, Artificial Sequence
  Synthetically generated peptide
  VARIANT (1)...(20): Xaa = Any Amino Acid
PGXTXCGEICAYAACXTGXC

SEQ ID NO: 1061 - protein, 20 aa, Artificial Sequence
  Synthetically generated peptide
  VARIANT (1)...(20): Xaa = Any Amino Acid
PGXTXCGEICAYAACXTGCX

SEQ ID NO: 1062 - protein, 19 aa, Artificial Sequence
  Synthetically generated peptide
  VARIANT (1)...(19): Xaa = Any Amino Acid
PGXTXCGEICAYAACTXGC

SEQ ID NO: 1063 - protein, 20 aa, Artificial Sequence
  Synthetically generated peptide
  VARIANT (1)...(20): Xaa = Any Amino Acid
PGXTXCGEICAYAACTXXGC

SEQ ID NO: 1064 - protein, 20 aa, Artificial Sequence
  Synthetically generated peptide
  VARIANT (1)...(20): Xaa = Any Amino Acid
PGXTXCGEICAYAACTXGXC

SEQ ID NO: 1065 - protein, 20 aa, Artificial Sequence
  Synthetically generated peptide
  VARIANT (1)...(20): Xaa = Any Amino Acid
PGXTXCGEICAYAACTXGCX

SEQ ID NO: 1066 - protein, 19 aa, Artificial Sequence
  Synthetically generated peptide
  VARIANT (1)...(19): Xaa = Any Amino Acid
PGXTXCGEICAYAACTGXC

SEQ ID NO: 1067 - protein, 20 aa, Artificial Sequence
  Synthetically generated peptide
  VARIANT (1)...(20): Xaa = Any Amino Acid
PGXTXCGEICAYAACTGXXC

SEQ ID NO: 1068 - protein, 20 aa, Artificial Sequence
  Synthetically generated peptide
  VARIANT (1)...(20): Xaa = Any Amino Acid
PGXTXCGEICAYAACTGXCX

SEQ ID NO: 1069 - protein, 19 aa, Artificial Sequence
  Synthetically generated peptide
  VARIANT (1)...(19): Xaa = Any Amino Acid
PGXTXCGEICAYAACTGCX

SEQ ID NO: 1070 - protein, 20 aa, Artificial Sequence
  Synthetically generated peptide
  VARIANT (1)...(20): Xaa = Any Amino Acid
PGXTXCGEICAYAACTGCXX

SEQ ID NO: 1071 - protein, 18 aa, Artificial Sequence
  Synthetically generated peptide
  VARIANT (1)...(18): Xaa = Any Amino Acid
PGXTCXGEICAYAACTGC

SEQ ID NO: 1072 - protein, 19 aa, Artificial Sequence
  Synthetically generated peptide
  VARIANT (1)...(19): Xaa = Any Amino Acid
PGXTCXXGEICAYAACTGC

SEQ ID NO: 1073 - protein, 20 aa, Artificial Sequence
  Synthetically generated peptide
  VARIANT (1)...(20): Xaa = Any Amino Acid
PGXTCXXXGEICAYAACTGC

SEQ ID NO: 1074 - protein, 20 aa, Artificial Sequence
  Synthetically generated peptide
  VARIANT (1)...(20): Xaa = Any Amino Acid
PGXTCXXGXEICAYAACTGC

SEQ ID NO: 1075 - protein, 20 aa, Artificial Sequence
  Synthetically generated peptide
  VARIANT (1)...(20): Xaa = Any Amino Acid
PGXTCXXGEXICAYAACTGC

SEQ ID NO: 1076 - protein, 20 aa, Artificial Sequence
  Synthetically generated peptide
  VARIANT (1)...(20): Xaa = Any Amino Acid
PGXTCXXGEIXCAYAACTGC

SEQ ID NO: 1077 - protein, 20 aa, Artificial Sequence
  Synthetically generated peptide
  VARIANT (1)...(20): Xaa = Any Amino Acid
PGXTCXXGEICXAYAACTGC

SEQ ID NO: 1078 - protein, 20 aa, Artificial Sequence
  Synthetically generated peptide
  VARIANT (1)...(20): Xaa = Any Amino Acid
PGXTCXXGEICAXYAACTGC

SEQ ID NO: 1079 - protein, 20 aa, Artificial Sequence
  Synthetically generated peptide
  VARIANT (1)...(20): Xaa = Any Amino Acid
PGXTCXXGEICAYXAACTGC

SEQ ID NO: 1080 - protein, 20 aa, Artificial Sequence
  Synthetically generated peptide
  VARIANT (1)...(20): Xaa = Any Amino Acid
PGXTCXXGEICAYAXACTGC

SEQ ID NO: 1081 - protein, 20 aa, Artificial Sequence
  Synthetically generated peptide
  VARIANT (1)...(20): Xaa = Any Amino Acid
PGXTCXXGEICAYAAXCTGC

SEQ ID NO: 1082 - protein, 20 aa, Artificial Sequence
  Synthetically generated peptide
  VARIANT (1)...(20): Xaa = Any Amino Acid
PGXTCXXGEICAYAACXTGC

SEQ ID NO: 1083 - protein, 20 aa, Artificial Sequence
  Synthetically generated peptide
  VARIANT (1)...(20): Xaa = Any Amino Acid
PGXTCXXGEICAYAACTXGC

SEQ ID NO: 1084 - protein, 20 aa, Artificial Sequence
  Synthetically generated peptide
  VARIANT (1)...(20): Xaa = Any Amino Acid
PGXTCXXGEICAYAACTGXC

SEQ ID NO: 1085 - protein, 20 aa, Artificial Sequence
  Synthetically generated peptide
  VARIANT (1)...(20): Xaa = Any Amino Acid
PGXTCXXGEICAYAACTGCX

SEQ ID NO: 1086 - protein, 19 aa, Artificial Sequence
  Synthetically generated peptide
  VARIANT (1)...(19): Xaa = Any Amino Acid
PGXTCXGXEICAYAACTGC

SEQ ID NO: 1087 - protein, 20 aa, Artificial Sequence
  Synthetically generated peptide
  VARIANT (1)...(20): Xaa = Any Amino Acid
PGXTCXGXXEICAYAACTGC

SEQ ID NO: 1088 - protein, 20 aa, Artificial Sequence
  Synthetically generated peptide
  VARIANT (1)...(20): Xaa = Any Amino Acid
PGXTCXGXEXICAYAACTGC

SEQ ID NO: 1089 - protein, 20 aa, Artificial Sequence
  Synthetically generated peptide
  VARIANT (1)...(20): Xaa = Any Amino Acid
PGXTCXGXEIXCAYAACTGC

SEQ ID NO: 1090 - protein, 20 aa, Artificial Sequence
  Synthetically generated peptide
  VARIANT (1)...(20): Xaa = Any Amino Acid
PGXTCXGXEICXAYAACTGC

SEQ ID NO: 1091 - protein, 20 aa, Artificial Sequence
  Synthetically generated peptide
  VARIANT (1)...(20): Xaa = Any Amino Acid
PGXTCXGXEICAXYAACTGC

SEQ ID NO: 1092 - protein, 20 aa, Artificial Sequence
  Synthetically generated peptide
  VARIANT (1)...(20): Xaa = Any Amino Acid
PGXTCXGXEICAYXAACTGC

SEQ ID NO: 1093 - protein, 20 aa, Artificial Sequence
  Synthetically generated peptide
  VARIANT (1)...(20): Xaa = Any Amino Acid
PGXTCXGXEICAYAXACTGC

SEQ ID NO: 1094 - protein, 20 aa, Artificial Sequence
  Synthetically generated peptide
  VARIANT (1)...(20): Xaa = Any Amino Acid
PGXTCXGXEICAYAAXCTGC

SEQ ID NO: 1095 - protein, 20 aa, Artificial Sequence
  Synthetically generated peptide
  VARIANT (1)...(20): Xaa = Any Amino Acid
PGXTCXGXEICAYAACXTGC

SEQ ID NO: 1096 - protein, 20 aa, Artificial Sequence
  Synthetically generated peptide
  VARIANT (1)...(20): Xaa = Any Amino Acid
PGXTCXGXEICAYAACTXGC

SEQ ID NO: 1097 - protein, 20 aa, Artificial Sequence
  Synthetically generated peptide
  VARIANT (1)...(20): Xaa = Any Amino Acid
PGXTCXGXEICAYAACTGXC

SEQ ID NO: 1098 - protein, 20 aa, Artificial Sequence
  Synthetically generated peptide
  VARIANT (1)...(20): Xaa = Any Amino Acid
PGXTCXGXEICAYAACTGCX

SEQ ID NO: 1099 - protein, 19 aa, Artificial Sequence
  Synthetically generated peptide
  VARIANT (1)...(19): Xaa = Any Amino Acid
PGXTCXGEXICAYAACTGC

SEQ ID NO: 1100 - protein, 20 aa, Artificial Sequence
  Synthetically generated peptide
  VARIANT (1)...(20): Xaa = Any Amino Acid
PGXTCXGEXXICAYAACTGC

SEQ ID NO: 1101 - protein, 20 aa, Artificial Sequence
  Synthetically generated peptide
  VARIANT (1)...(20): Xaa = Any Amino Acid
PGXTCXGEXIXCAYAACTGC

SEQ ID NO: 1102 - protein, 20 aa, Artificial Sequence
  Synthetically generated peptide
  VARIANT (1)...(20): Xaa = Any Amino Acid
PGXTCXGEXICXAYAACTGC

SEQ ID NO: 1103 - protein, 20 aa, Artificial Sequence
  Synthetically generated peptide
  VARIANT (1)...(20): Xaa = Any Amino Acid
PGXTCXGEXICAXYAACTGC

SEQ ID NO: 1104 - protein, 20 aa, Artificial Sequence
  Synthetically generated peptide
  VARIANT (1)...(20): Xaa = Any Amino Acid
PGXTCXGEXICAYXAACTGC

SEQ ID NO: 1105 - protein, 20 aa, Artificial Sequence
  Synthetically generated peptide
  VARIANT (1)...(20): Xaa = Any Amino Acid
PGXTCXGEXICAYAXACTGC

SEQ ID NO: 1106 - protein, 20 aa, Artificial Sequence
  Synthetically generated peptide
  VARIANT (1)...(20): Xaa = Any Amino Acid
PGXTCXGEXICAYAAXCTGC

SEQ ID NO: 1107 - protein, 20 aa, Artificial Sequence
  Synthetically generated peptide
  VARIANT (1)...(20): Xaa = Any Amino Acid
PGXTCXGEXICAYAACXTGC

SEQ ID NO: 1108 - protein, 20 aa, Artificial Sequence
  Synthetically generated peptide
  VARIANT (1)...(20): Xaa = Any Amino Acid
PGXTCXGEXICAYAACTXGC

SEQ ID NO: 1109 - protein, 20 aa, Artificial Sequence
  Synthetically generated peptide
  VARIANT (1)...(20): Xaa = Any Amino Acid
PGXTCXGEXICAYAACTGXC

SEQ ID NO: 1110 - protein, 20 aa, Artificial Sequence
  Synthetically generated peptide
  VARIANT (1)...(20): Xaa = Any Amino Acid
PGXTCXGEXICAYAACTGCX

SEQ ID NO: 1111 - protein, 19 aa, Artificial Sequence
  Synthetically generated peptide
  VARIANT (1)...(19): Xaa = Any Amino Acid
PGXTCXGEIXCAYAACTGC

SEQ ID NO: 1112 - protein, 20 aa, Artificial Sequence
  Synthetically generated peptide
  VARIANT (1)...(20): Xaa = Any Amino Acid
PGXTCXGEIXXCAYAACTGC

SEQ ID NO: 1113 - protein, 20 aa, Artificial Sequence
  Synthetically generated peptide
  VARIANT (1)...(20): Xaa = Any Amino Acid
PGXTCXGEIXCXAYAACTGC

SEQ ID NO: 1114 - protein, 20 aa, Artificial Sequence
  Synthetically generated peptide
  VARIANT (1)...(20): Xaa = Any Amino Acid
PGXTCXGEIXCAXYAACTGC

SEQ ID NO: 1115 - protein, 20 aa, Artificial Sequence
  Synthetically generated peptide
  VARIANT (1)...(20): Xaa = Any Amino Acid
PGXTCXGEIXCAYXAACTGC

SEQ ID NO: 1116 - protein, 20 aa, Artificial Sequence
  Synthetically generated peptide
  VARIANT (1)...(20): Xaa = Any Amino Acid
PGXTCXGEIXCAYAXACTGC

SEQ ID NO: 1117 - protein, 20 aa, Artificial Sequence
  Synthetically generated peptide
  VARIANT (1)...(20): Xaa = Any Amino Acid
PGXTCXGEIXCAYAAXCTGC

SEQ ID NO: 1118 - protein, 20 aa, Artificial Sequence
  Synthetically generated peptide
  VARIANT (1)...(20): Xaa = Any Amino Acid
PGXTCXGEIXCAYAACXTGC

SEQ ID NO: 1119 - protein, 20 aa, Artificial Sequence
  Synthetically generated peptide
  VARIANT (1)...(20): Xaa = Any Amino Acid
PGXTCXGEIXCAYAACTXGC

SEQ ID NO: 1120 - protein, 20 aa, Artificial Sequence
  Synthetically generated peptide
  VARIANT (1)...(20): Xaa = Any Amino Acid
PGXTCXGEIXCAYAACTGXC

SEQ ID NO: 1121 - protein, 20 aa, Artificial Sequence
  Synthetically generated peptide
  VARIANT (1)...(20): Xaa = Any Amino Acid
PGXTCXGEIXCAYAACTGCX

SEQ ID NO: 1122 - protein, 19 aa, Artificial Sequence
  Synthetically generated peptide
  VARIANT (1)...(19): Xaa = Any Amino Acid
PGXTCXGEICXAYAACTGC

SEQ ID NO: 1123 - protein, 20 aa, Artificial Sequence
  Synthetically generated peptide
  VARIANT (1)...(20): Xaa = Any Amino Acid
PGXTCXGEICXXAYAACTGC

SEQ ID NO: 1124 - protein, 20 aa, Artificial Sequence
  Synthetically generated peptide
  VARIANT (1)...(20): Xaa = Any Amino Acid
PGXTCXGEICXAXYAACTGC

SEQ ID NO: 1125 - protein, 20 aa, Artificial Sequence
  Synthetically generated peptide
  VARIANT (1)...(20): Xaa = Any Amino Acid
PGXTCXGEICXAYXAACTGC

SEQ ID NO: 1126 - protein, 20 aa, Artificial Sequence
  Synthetically generated peptide
  VARIANT (1)...(20): Xaa = Any Amino Acid
PGXTCXGEICXAYAXACTGC

SEQ ID NO: 1127 - protein, 20 aa, Artificial Sequence
  Synthetically generated peptide
  VARIANT (1)...(20): Xaa = Any Amino Acid
PGXTCXGEICXAYAAXCTGC

SEQ ID NO: 1128 - protein, 20 aa, Artificial Sequence
  Synthetically generated peptide
  VARIANT (1)...(20): Xaa = Any Amino Acid
PGXTCXGEICXAYAACXTGC

SEQ ID NO: 1129 - protein, 20 aa, Artificial Sequence
  Synthetically generated peptide
  VARIANT (1)...(20): Xaa = Any Amino Acid
PGXTCXGEICXAYAACTXGC

SEQ ID NO: 1130 - protein, 20 aa, Artificial Sequence
  Synthetically generated peptide
  VARIANT (1)...(20): Xaa = Any Amino Acid
PGXTCXGEICXAYAACTGXC

SEQ ID NO: 1131 - protein, 20 aa, Artificial Sequence
  Synthetically generated peptide
  VARIANT (1)...(20): Xaa = Any Amino Acid
PGXTCXGEICXAYAACTGCX

SEQ ID NO: 1132 - protein, 19 aa, Artificial Sequence
  Synthetically generated peptide
  VARIANT (1)...(19): Xaa = Any Amino Acid
PGXTCXGEICAXYAACTGC

SEQ ID NO: 1133 - protein, 20 aa, Artificial Sequence
  Synthetically generated peptide
  VARIANT (1)...(20): Xaa = Any Amino Acid
PGXTCXGEICAXXYAACTGC

SEQ ID NO: 1134 - protein, 20 aa, Artificial Sequence
  Synthetically generated peptide
  VARIANT (1)...(20): Xaa = Any Amino Acid
PGXTCXGEICAXYXAACTGC

SEQ ID NO: 1135 - protein, 20 aa, Artificial Sequence
  Synthetically generated peptide
  VARIANT (1)...(20): Xaa = Any Amino Acid
PGXTCXGEICAXYAXACTGC

SEQ ID NO: 1136 - protein, 20 aa, Artificial Sequence
  Synthetically generated peptide
  VARIANT (1)...(20): Xaa = Any Amino Acid
PGXTCXGEICAXYAAXCTGC

SEQ ID NO: 1137 - protein, 20 aa, Artificial Sequence
  Synthetically generated peptide
  VARIANT (1)...(20): Xaa = Any Amino Acid
PGXTCXGEICAXYAACXTGC

SEQ ID NO: 1138 - protein, 20 aa, Artificial Sequence
  Synthetically generated peptide
  VARIANT (1)...(20): Xaa = Any Amino Acid
PGXTCXGEICAXYAACTXGC

SEQ ID NO: 1139 - protein, 20 aa, Artificial Sequence
  Synthetically generated peptide
  VARIANT (1)...(20): Xaa = Any Amino Acid
PGXTCXGEICAXYAACTGXC

SEQ ID NO: 1140 - protein, 20 aa, Artificial Sequence
  Synthetically generated peptide
  VARIANT (1)...(20): Xaa = Any Amino Acid
PGXTCXGEICAXYAACTGCX

SEQ ID NO: 1141 - protein, 19 aa, Artificial Sequence
  Synthetically generated peptide
  VARIANT (1)...(19): Xaa = Any Amino Acid
PGXTCXGEICAYXAACTGC

SEQ ID NO: 1142 - protein, 20 aa, Artificial Sequence
  Synthetically generated peptide
  VARIANT (1)...(20): Xaa = Any Amino Acid
PGXTCXGEICAYXXAACTGC

SEQ ID NO: 1143 - protein, 20 aa, Artificial Sequence
  Synthetically generated peptide
  VARIANT (1)...(20): Xaa = Any Amino Acid
PGXTCXGEICAYXAXACTGC

SEQ ID NO: 1144 - protein, 20 aa, Artificial Sequence
  Synthetically generated peptide
  VARIANT (1)...(20): Xaa = Any Amino Acid
PGXTCXGEICAYXAAXCTGC

SEQ ID NO: 1145 - protein, 20 aa, Artificial Sequence
  Synthetically generated peptide
  VARIANT (1)...(20): Xaa = Any Amino Acid
PGXTCXGEICAYXAACXTGC

SEQ ID NO: 1146 - protein, 20 aa, Artificial Sequence
  Synthetically generated peptide
  VARIANT (1)...(20): Xaa = Any Amino Acid
PGXTCXGEICAYXAACTXGC

SEQ ID NO: 1147 - protein, 20 aa, Artificial Sequence
  Synthetically generated peptide
  VARIANT (1)...(20): Xaa = Any Amino Acid
PGXTCXGEICAYXAACTGXC

SEQ ID NO: 1148 - protein, 20 aa, Artificial Sequence
  Synthetically generated peptide
  VARIANT (1)...(20): Xaa = Any Amino Acid
PGXTCXGEICAYXAACTGCX

SEQ ID NO: 1149 - protein, 19 aa, Artificial Sequence
  Synthetically generated peptide
  VARIANT (1)...(19): Xaa = Any Amino Acid
PGXTCXGEICAYAXACTGC

SEQ ID NO: 1150 - protein, 20 aa, Artificial Sequence
  Synthetically generated peptide
  VARIANT (1)...(20): Xaa = Any Amino Acid
PGXTCXGEICAYAXXACTGC

SEQ ID NO: 1151 - protein, 20 aa, Artificial Sequence
  Synthetically generated peptide
  VARIANT (1)...(20): Xaa = Any Amino Acid
PGXTCXGEICAYAXAXCTGC

SEQ ID NO: 1152 - protein, 20 aa, Artificial Sequence
  Synthetically generated peptide
  VARIANT (1)...(20): Xaa = Any Amino Acid
PGXTCXGEICAYAXACXTGC

SEQ ID NO: 1153 - protein, 20 aa, Artificial Sequence
  Synthetically generated peptide
  VARIANT (1)...(20): Xaa = Any Amino Acid
PGXTCXGEICAYAXACTXGC

SEQ ID NO: 1154 - protein, 20 aa, Artificial Sequence
  Synthetically generated peptide
  VARIANT (1)...(20): Xaa = Any Amino Acid
PGXTCXGEICAYAXACTGXC

SEQ ID NO: 1155 - protein, 20 aa, Artificial Sequence
  Synthetically generated peptide
  VARIANT (1)...(20): Xaa = Any Amino Acid
PGXTCXGEICAYAXACTGCX

SEQ ID NO: 1156 - protein, 19 aa, Artificial Sequence
  Synthetically generated peptide
  VARIANT (1)...(19): Xaa = Any Amino Acid
PGXTCXGEICAYAAXCTGC

SEQ ID NO: 1157 - protein, 20 aa, Artificial Sequence
  Synthetically generated peptide
  VARIANT (1)...(20): Xaa = Any Amino Acid
PGXTCXGEICAYAAXXCTGC

SEQ ID NO: 1158 - protein, 20 aa, Artificial Sequence
  Synthetically generated peptide
  VARIANT (1)...(20): Xaa = Any Amino Acid
PGXTCXGEICAYAAXCXTGC

SEQ ID NO: 1159 - protein, 20 aa, Artificial Sequence
  Synthetically generated peptide
  VARIANT (1)...(20): Xaa = Any Amino Acid
PGXTCXGEICAYAAXCTXGC

SEQ ID NO: 1160 - protein, 20 aa, Artificial Sequence
  Synthetically generated peptide
  VARIANT (1)...(20): Xaa = Any Amino Acid
PGXTCXGEICAYAAXCTGXC

SEQ ID NO: 1161 - protein, 20 aa, Artificial Sequence
  Synthetically generated peptide
  VARIANT (1)...(20): Xaa = Any Amino Acid
PGXTCXGEICAYAAXCTGCX

SEQ ID NO: 1162 - protein, 19 aa, Artificial Sequence
  Synthetically generated peptide
  VARIANT (1)...(19): Xaa = Any Amino Acid
PGXTCXGEICAYAACXTGC

SEQ ID NO: 1163 - protein, 20 aa, Artificial Sequence
  Synthetically generated peptide
  VARIANT (1)...(20): Xaa = Any Amino Acid
PGXTCXGEICAYAACXXTGC

SEQ ID NO: 1164 - protein, 20 aa, Artificial Sequence
  Synthetically generated peptide
  VARIANT (1)...(20): Xaa = Any Amino Acid
PGXTCXGEICAYAACXTXGC

SEQ ID NO: 1165 - protein, 20 aa, Artificial Sequence
  Synthetically generated peptide
  VARIANT (1)...(20): Xaa = Any Amino Acid
PGXTCXGEICAYAACXTGXC

SEQ ID NO: 1166 - protein, 20 aa, Artificial Sequence
  Synthetically generated peptide
  VARIANT (1)...(20): Xaa = Any Amino Acid
PGXTCXGEICAYAACXTGCX

SEQ ID NO: 1167 - protein, 19 aa, Artificial Sequence
  Synthetically generated peptide
  VARIANT (1)...(19): Xaa = Any Amino Acid
PGXTCXGEICAYAACTXGC

SEQ ID NO: 1168 - protein, 20 aa, Artificial Sequence
  Synthetically generated peptide
  VARIANT (1)...(20): Xaa = Any Amino Acid
PGXTCXGEICAYAACTXXGC

SEQ ID NO: 1169 - protein, 20 aa, Artificial Sequence
  Synthetically generated peptide
  VARIANT (1)...(20): Xaa = Any Amino Acid
PGXTCXGEICAYAACTXGXC

SEQ ID NO: 1170 - protein, 20 aa, Artificial Sequence
  Synthetically generated peptide
  VARIANT (1)...(20): Xaa = Any Amino Acid
PGXTCXGEICAYAACTXGCX

SEQ ID NO: 1171 - protein, 19 aa, Artificial Sequence
  Synthetically generated peptide
  VARIANT (1)...(19): Xaa = Any Amino Acid
PGXTCXGEICAYAACTGXC

SEQ ID NO: 1172 - protein, 20 aa, Artificial Sequence
  Synthetically generated peptide
  VARIANT (1)...(20): Xaa = Any Amino Acid
PGXTCXGEICAYAACTGXXC

SEQ ID NO: 1173 - protein, 20 aa, Artificial Sequence
  Synthetically generated peptide
  VARIANT (1)...(20): Xaa = Any Amino Acid
PGXTCXGEICAYAACTGXCX

SEQ ID NO: 1174 - protein, 19 aa, Artificial Sequence
  Synthetically generated peptide
  VARIANT (1)...(19): Xaa = Any Amino Acid
PGXTCXGEICAYAACTGCX

SEQ ID NO: 1175 - protein, 20 aa, Artificial Sequence
  Synthetically generated peptide
  VARIANT (1)...(20): Xaa = Any Amino Acid
PGXTCXGEICAYAACTGCXX

SEQ ID NO: 1176 - protein, 18 aa, Artificial Sequence
  Synthetically generated peptide
  VARIANT (1)...(18): Xaa = Any Amino Acid
PGXTCGXEICAYAACTGC

SEQ ID NO: 1177 - protein, 19 aa, Artificial Sequence
  Synthetically generated peptide
  VARIANT (1)...(19): Xaa = Any Amino Acid
PGXTCGXXEICAYAACTGC

SEQ ID NO: 1178 - protein, 20 aa, Artificial Sequence
  Synthetically generated peptide
  VARIANT (1)...(20): Xaa = Any Amino Acid
PGXTCGXXXEICAYAACTGC

SEQ ID NO: 1179 - protein, 20 aa, Artificial Sequence
  Synthetically generated peptide
  VARIANT (1)...(20): Xaa = Any Amino Acid
PGXTCGXXEXICAYAACTGC

SEQ ID NO: 1180 - protein, 20 aa, Artificial Sequence
  Synthetically generated peptide
  VARIANT (1)...(20): Xaa = Any Amino Acid
PGXTCGXXEIXCAYAACTGC

SEQ ID NO: 1181 - protein, 20 aa, Artificial Sequence
  Synthetically generated peptide
  VARIANT (1)...(20): Xaa = Any Amino Acid
PGXTCGXXEICXAYAACTGC

SEQ ID NO: 1182 - protein, 20 aa, Artificial Sequence
  Synthetically generated peptide
  VARIANT (1)...(20): Xaa = Any Amino Acid
PGXTCGXXEICAXYAACTGC

SEQ ID NO: 1183 - protein, 20 aa, Artificial Sequence
  Synthetically generated peptide
  VARIANT (1)...(20): Xaa = Any Amino Acid
PGXTCGXXEICAYXAACTGC

SEQ ID NO: 1184 - protein, 20 aa, Artificial Sequence
  Synthetically generated peptide
  VARIANT (1)...(20): Xaa = Any Amino Acid
PGXTCGXXEICAYAXACTGC

SEQ ID NO: 1185 - protein, 20 aa, Artificial Sequence
  Synthetically generated peptide
  VARIANT (1)...(20): Xaa = Any Amino Acid
PGXTCGXXEICAYAAXCTGC

SEQ ID NO: 1186 - protein, 20 aa, Artificial Sequence
  Synthetically generated peptide
  VARIANT (1)...(20): Xaa = Any Amino Acid
PGXTCGXXEICAYAACXTGC

SEQ ID NO: 1187 - protein, 20 aa, Artificial Sequence
  Synthetically generated peptide
  VARIANT (1)...(20): Xaa = Any Amino Acid
PGXTCGXXEICAYAACTXGC

SEQ ID NO: 1188 - protein, 20 aa, Artificial Sequence
  Synthetically generated peptide
  VARIANT (1)...(20): Xaa = Any Amino Acid
PGXTCGXXEICAYAACTGXC

SEQ ID NO: 1189 - protein, 20 aa, Artificial Sequence
  Synthetically generated peptide
  VARIANT (1)...(20): Xaa = Any Amino Acid
PGXTCGXXEICAYAACTGCX

SEQ ID NO: 1190 - protein, 19 aa, Artificial Sequence
  Synthetically generated peptide
  VARIANT (1)...(19): Xaa = Any Amino Acid
PGXTCGXEXICAYAACTGC

SEQ ID NO: 1191 - protein, 20 aa, Artificial Sequence
  Synthetically generated peptide
  VARIANT (1)...(20): Xaa = Any Amino Acid
PGXTCGXEXXICAYAACTGC

SEQ ID NO: 1192 - protein, 20 aa, Artificial Sequence
  Synthetically generated peptide
  VARIANT (1)...(20): Xaa = Any Amino Acid
PGXTCGXEXIXCAYAACTGC

SEQ ID NO: 1193 - protein, 20 aa, Artificial Sequence
  Synthetically generated peptide
  VARIANT (1)...(20): Xaa = Any Amino Acid
PGXTCGXEXICXAYAACTGC

SEQ ID NO: 1194 - protein, 20 aa, Artificial Sequence
  Synthetically generated peptide
  VARIANT (1)...(20): Xaa = Any Amino Acid
PGXTCGXEXICAXYAACTGC

SEQ ID NO: 1195 - protein, 20 aa, Artificial Sequence
  Synthetically generated peptide
  VARIANT (1)...(20): Xaa = Any Amino Acid
PGXTCGXEXICAYXAACTGC

SEQ ID NO: 1196 - protein, 20 aa, Artificial Sequence
  Synthetically generated peptide
  VARIANT (1)...(20): Xaa = Any Amino Acid
PGXTCGXEXICAYAXACTGC

SEQ ID NO: 1197 - protein, 20 aa, Artificial Sequence
  Synthetically generated peptide
  VARIANT (1)...(20): Xaa = Any Amino Acid
PGXTCGXEXICAYAAXCTGC

SEQ ID NO: 1198 - protein, 20 aa, Artificial Sequence
  Synthetically generated peptide
  VARIANT (1)...(20): Xaa = Any Amino Acid
PGXTCGXEXICAYAACXTGC

SEQ ID NO: 1199 - protein, 20 aa, Artificial Sequence
  Synthetically generated peptide
  VARIANT (1)...(20): Xaa = Any Amino Acid
PGXTCGXEXICAYAACTXGC

SEQ ID NO: 1200 - protein, 20 aa, Artificial Sequence
  Synthetically generated peptide
  VARIANT (1)...(20): Xaa = Any Amino Acid
PGXTCGXEXICAYAACTGXC

SEQ ID NO: 1201 - protein, 20 aa, Artificial Sequence
  Synthetically generated peptide
  VARIANT (1)...(20): Xaa = Any Amino Acid
PGXTCGXEXICAYAACTGCX

SEQ ID NO: 1202 - protein, 19 aa, Artificial Sequence
  Synthetically generated peptide
  VARIANT (1)...(19): Xaa = Any Amino Acid
PGXTCGXEIXCAYAACTGC

SEQ ID NO: 1203 - protein, 20 aa, Artificial Sequence
  Synthetically generated peptide
  VARIANT (1)...(20): Xaa = Any Amino Acid
PGXTCGXEIXXCAYAACTGC

SEQ ID NO: 1204 - protein, 20 aa, Artificial Sequence
  Synthetically generated peptide
  VARIANT (1)...(20): Xaa = Any Amino Acid
PGXTCGXEIXCXAYAACTGC

SEQ ID NO: 1205 - protein, 20 aa, Artificial Sequence
  Synthetically generated peptide
  VARIANT (1)...(20): Xaa = Any Amino Acid
PGXTCGXEIXCAXYAACTGC

SEQ ID NO: 1206 - protein, 20 aa, Artificial Sequence
  Synthetically generated peptide
  VARIANT (1)...(20): Xaa = Any Amino Acid
PGXTCGXEIXCAYXAACTGC

SEQ ID NO: 1207 - protein, 20 aa, Artificial Sequence
  Synthetically generated peptide
  VARIANT (1)...(20): Xaa = Any Amino Acid
PGXTCGXEIXCAYAXACTGC

SEQ ID NO: 1208 - protein, 20 aa, Artificial Sequence
  Synthetically generated peptide
  VARIANT (1)...(20): Xaa = Any Amino Acid
PGXTCGXEIXCAYAAXCTGC

SEQ ID NO: 1209 - protein, 20 aa, Artificial Sequence
  Synthetically generated peptide
  VARIANT (1)...(20): Xaa = Any Amino Acid
PGXTCGXEIXCAYAACXTGC

SEQ ID NO: 1210 - protein, 20 aa, Artificial Sequence
  Synthetically generated peptide
  VARIANT (1)...(20): Xaa = Any Amino Acid
PGXTCGXEIXCAYAACTXGC

SEQ ID NO: 1211 - protein, 20 aa, Artificial Sequence
  Synthetically generated peptide
  VARIANT (1)...(20): Xaa = Any Amino Acid
PGXTCGXEIXCAYAACTGXC

SEQ ID NO: 1212 - protein, 20 aa, Artificial Sequence
  Synthetically generated peptide
  VARIANT (1)...(20): Xaa = Any Amino Acid
PGXTCGXEIXCAYAACTGCX

SEQ ID NO: 1213 - protein, 19 aa, Artificial Sequence
  Synthetically generated peptide
  VARIANT (1)...(19): Xaa = Any Amino Acid
PGXTCGXEICXAYAACTGC

SEQ ID NO: 1214 - protein, 20 aa, Artificial Sequence
  Synthetically generated peptide
  VARIANT (1)...(20): Xaa = Any Amino Acid
PGXTCGXEICXXAYAACTGC

SEQ ID NO: 1215 - protein, 20 aa, Artificial Sequence
  Synthetically generated peptide
  VARIANT (1)...(20): Xaa = Any Amino Acid
PGXTCGXEICXAXYAACTGC

SEQ ID NO: 1216 - protein, 20 aa, Artificial Sequence
  Synthetically generated peptide
  VARIANT (1)...(20): Xaa = Any Amino Acid
PGXTCGXEICXAYXAACTGC

SEQ ID NO: 1217 - protein, 20 aa, Artificial Sequence
  Synthetically generated peptide
  VARIANT (1)...(20): Xaa = Any Amino Acid
PGXTCGXEICXAYAXACTGC

SEQ ID NO: 1218 - protein, 20 aa, Artificial Sequence
  Synthetically generated peptide
  VARIANT (1)...(20): Xaa = Any Amino Acid
PGXTCGXEICXAYAAXCTGC

SEQ ID NO: 1219 - protein, 20 aa, Artificial Sequence
  Synthetically generated peptide
  VARIANT (1)...(20): Xaa = Any Amino Acid
PGXTCGXEICXAYAACXTGC

SEQ ID NO: 1220 - protein, 20 aa, Artificial Sequence
  Synthetically generated peptide
  VARIANT (1)...(20): Xaa = Any Amino Acid
PGXTCGXEICXAYAACTXGC

SEQ ID NO: 1221 - protein, 20 aa, Artificial Sequence
  Synthetically generated peptide
  VARIANT (1)...(20): Xaa = Any Amino Acid
PGXTCGXEICXAYAACTGXC

SEQ ID NO: 1222 - protein, 20 aa, Artificial Sequence
  Synthetically generated peptide
  VARIANT (1)...(20): Xaa = Any Amino Acid
PGXTCGXEICXAYAACTGCX

SEQ ID NO: 1223 - protein, 19 aa, Artificial Sequence
  Synthetically generated peptide
  VARIANT (1)...(19): Xaa = Any Amino Acid
PGXTCGXEICAXYAACTGC

SEQ ID NO: 1224 - protein, 20 aa, Artificial Sequence
  Synthetically generated peptide
  VARIANT (1)...(20): Xaa = Any Amino Acid
PGXTCGXEICAXXYAACTGC

SEQ ID NO: 1225 - protein, 20 aa, Artificial Sequence
  Synthetically generated peptide
  VARIANT (1)...(20): Xaa = Any Amino Acid
PGXTCGXEICAXYXAACTGC

SEQ ID NO: 1226 - protein, 20 aa, Artificial Sequence
  Synthetically generated peptide
  VARIANT (1)...(20): Xaa = Any Amino Acid
PGXTCGXEICAXYAXACTGC

SEQ ID NO: 1227 - protein, 20 aa, Artificial Sequence
  Synthetically generated peptide
  VARIANT (1)...(20): Xaa = Any Amino Acid
PGXTCGXEICAXYAAXCTGC

SEQ ID NO: 1228 - protein, 20 aa, Artificial Sequence
  Synthetically generated peptide
  VARIANT (1)...(20): Xaa = Any Amino Acid
PGXTCGXEICAXYAACXTGC

SEQ ID NO: 1229 - protein, 20 aa, Artificial Sequence
  Synthetically generated peptide
  VARIANT (1)...(20): Xaa = Any Amino Acid
PGXTCGXEICAXYAACTXGC

SEQ ID NO: 1230 - protein, 20 aa, Artificial Sequence
  Synthetically generated peptide
  VARIANT (1)...(20): Xaa = Any Amino Acid
PGXTCGXEICAXYAACTGXC

SEQ ID NO: 1231 - protein, 20 aa, Artificial Sequence
  Synthetically generated peptide
  VARIANT (1)...(20): Xaa = Any Amino Acid
PGXTCGXEICAXYAACTGCX

SEQ ID NO: 1232 - protein, 19 aa, Artificial Sequence
  Synthetically generated peptide
  VARIANT (1)...(19): Xaa = Any Amino Acid
PGXTCGXEICAYXAACTGC

SEQ ID NO: 1233 - protein, 20 aa, Artificial Sequence
  Synthetically generated peptide
  VARIANT (1)...(20): Xaa = Any Amino Acid
PGXTCGXEICAYXXAACTGC

SEQ ID NO: 1234 - protein, 20 aa, Artificial Sequence
  Synthetically generated peptide
  VARIANT (1)...(20): Xaa = Any Amino Acid
PGXTCGXEICAYXAXACTGC

SEQ ID NO: 1235 - protein, 20 aa, Artificial Sequence
  Synthetically generated peptide
  VARIANT (1)...(20): Xaa = Any Amino Acid
PGXTCGXEICAYXAAXCTGC

SEQ ID NO: 1236 - protein, 20 aa, Artificial Sequence
  Synthetically generated peptide
  VARIANT (1)...(20): Xaa = Any Amino Acid
PGXTCGXEICAYXAACXTGC

SEQ ID NO: 1237 - protein, 20 aa, Artificial Sequence
  Synthetically generated peptide
  VARIANT (1)...(20): Xaa = Any Amino Acid
PGXTCGXEICAYXAACTXGC

SEQ ID NO: 1238 - protein, 20 aa, Artificial Sequence
  Synthetically generated peptide
  VARIANT (1)...(20): Xaa = Any Amino Acid
PGXTCGXEICAYXAACTGXC

SEQ ID NO: 1239 - protein, 20 aa, Artificial Sequence
  Synthetically generated peptide
  VARIANT (1)...(20): Xaa = Any Amino Acid
PGXTCGXEICAYXAACTGCX

SEQ ID NO: 1240 - protein, 19 aa, Artificial Sequence
  Synthetically generated peptide
  VARIANT (1)...(19): Xaa = Any Amino Acid
PGXTCGXEICAYAXACTGC

SEQ ID NO: 1241 - protein, 20 aa, Artificial Sequence
  Synthetically generated peptide
  VARIANT (1)...(20): Xaa = Any Amino Acid
PGXTCGXEICAYAXXACTGC

SEQ ID NO: 1242 - protein, 20 aa, Artificial Sequence
  Synthetically generated peptide
  VARIANT (1)...(20): Xaa = Any Amino Acid
PGXTCGXEICAYAXAXCTGC

SEQ ID NO: 1243 - protein, 20 aa, Artificial Sequence
  Synthetically generated peptide
  VARIANT (1)...(20): Xaa = Any Amino Acid
PGXTCGXEICAYAXACXTGC

SEQ ID NO: 1244 - protein, 20 aa, Artificial Sequence
  Synthetically generated peptide
  VARIANT (1)...(20): Xaa = Any Amino Acid
PGXTCGXEICAYAXACTXGC

SEQ ID NO: 1245 - protein, 20 aa, Artificial Sequence
  Synthetically generated peptide
  VARIANT (1)...(20): Xaa = Any Amino Acid
PGXTCGXEICAYAXACTGXC

SEQ ID NO: 1246 - protein, 20 aa, Artificial Sequence
  Synthetically generated peptide
  VARIANT (1)...(20): Xaa = Any Amino Acid
PGXTCGXEICAYAXACTGCX

SEQ ID NO: 1247 - protein, 19 aa, Artificial Sequence
  Synthetically generated peptide
  VARIANT (1)...(19): Xaa = Any Amino Acid
PGXTCGXEICAYAAXCTGC

SEQ ID NO: 1248 - protein, 20 aa, Artificial Sequence
  Synthetically generated peptide
  VARIANT (1)...(20): Xaa = Any Amino Acid
PGXTCGXEICAYAAXXCTGC

SEQ ID NO: 1249 - protein, 20 aa, Artificial Sequence
  Synthetically generated peptide
  VARIANT (1)...(20): Xaa = Any Amino Acid
PGXTCGXEICAYAAXCXTGC

SEQ ID NO: 1250 - protein, 20 aa, Artificial Sequence
  Synthetically generated peptide
  VARIANT (1)...(20): Xaa = Any Amino Acid
PGXTCGXEICAYAAXCTXGC

SEQ ID NO: 1251 - protein, 20 aa, Artificial Sequence
  Synthetically generated peptide
  VARIANT (1)...(20): Xaa = Any Amino Acid
PGXTCGXEICAYAAXCTGXC

SEQ ID NO: 1252 - protein, 20 aa, Artificial Sequence
  Synthetically generated peptide
  VARIANT (1)...(20): Xaa = Any Amino Acid
PGXTCGXEICAYAAXCTGCX

SEQ ID NO: 1253 - protein, 19 aa, Artificial Sequence
  Synthetically generated peptide
  VARIANT (1)...(19): Xaa = Any Amino Acid
PGXTCGXEICAYAACXTGC

SEQ ID NO: 1254 - protein, 20 aa, Artificial Sequence
  Synthetically generated peptide
  VARIANT (1)...(20): Xaa = Any Amino Acid
PGXTCGXEICAYAACXXTGC

SEQ ID NO: 1255 - protein, 20 aa, Artificial Sequence
  Synthetically generated peptide
  VARIANT (1)...(20): Xaa = Any Amino Acid
PGXTCGXEICAYAACXTXGC

SEQ ID NO: 1256 - protein, 20 aa, Artificial Sequence
  Synthetically generated peptide
  VARIANT (1)...(20): Xaa = Any Amino Acid
PGXTCGXEICAYAACXTGXC

SEQ ID NO: 1257 - protein, 20 aa, Artificial Sequence
  Synthetically generated peptide
  VARIANT (1)...(20): Xaa = Any Amino Acid
PGXTCGXEICAYAACXTGCX

SEQ ID NO: 1258 - protein, 19 aa, Artificial Sequence
  Synthetically generated peptide
  VARIANT (1)...(19): Xaa = Any Amino Acid
PGXTCGXEICAYAACTXGC

SEQ ID NO: 1259 - protein, 20 aa, Artificial Sequence
  Synthetically generated peptide
  VARIANT (1)...(20): Xaa = Any Amino Acid
PGXTCGXEICAYAACTXXGC

SEQ ID NO: 1260 - protein, 20 aa, Artificial Sequence
  Synthetically generated peptide
  VARIANT (1)...(20): Xaa = Any Amino Acid
PGXTCGXEICAYAACTXGXC

SEQ ID NO: 1261 - protein, 20 aa, Artificial Sequence
  Synthetically generated peptide
  VARIANT (1)...(20): Xaa = Any Amino Acid
PGXTCGXEICAYAACTXGCX

SEQ ID NO: 1262 - protein, 19 aa, Artificial Sequence
  Synthetically generated peptide
  VARIANT (1)...(19): Xaa = Any Amino Acid
PGXTCGXEICAYAACTGXC

SEQ ID NO: 1263 - protein, 20 aa, Artificial Sequence
  Synthetically generated peptide
  VARIANT (1)...(20): Xaa = Any Amino Acid
PGXTCGXEICAYAACTGXXC

SEQ ID NO: 1264 - protein, 20 aa, Artificial Sequence
  Synthetically generated peptide
  VARIANT (1)...(20): Xaa = Any Amino Acid
PGXTCGXEICAYAACTGXCX

SEQ ID NO: 1265 - protein, 19 aa, Artificial Sequence
  Synthetically generated peptide
  VARIANT (1)...(19): Xaa = Any Amino Acid
PGXTCGXEICAYAACTGCX

SEQ ID NO: 1266 - protein, 20 aa, Artificial Sequence
  Synthetically generated peptide
  VARIANT (1)...(20): Xaa = Any Amino Acid
PGXTCGXEICAYAACTGCXX

SEQ ID NO: 1267 - protein, 18 aa, Artificial Sequence
  Synthetically generated peptide
  VARIANT (1)...(18): Xaa = Any Amino Acid
PGXTCGEXICAYAACTGC

SEQ ID NO: 1268 - protein, 19 aa, Artificial Sequence
  Synthetically generated peptide
  VARIANT (1)...(19): Xaa = Any Amino Acid
PGXTCGEXXICAYAACTGC

SEQ ID NO: 1269 - protein, 20 aa, Artificial Sequence
  Synthetically generated peptide
  VARIANT (1)...(20): Xaa = Any Amino Acid
PGXTCGEXXXICAYAACTGC

SEQ ID NO: 1270 - protein, 20 aa, Artificial Sequence
  Synthetically generated peptide
  VARIANT (1)...(20): Xaa = Any Amino Acid
PGXTCGEXXIXCAYAACTGC

SEQ ID NO: 1271 - protein, 20 aa, Artificial Sequence
  Synthetically generated peptide
  VARIANT (1)...(20): Xaa = Any Amino Acid
PGXTCGEXXICXAYAACTGC

SEQ ID NO: 1272 - protein, 20 aa, Artificial Sequence
  Synthetically generated peptide
  VARIANT (1)...(20): Xaa = Any Amino Acid
PGXTCGEXXICAXYAACTGC

SEQ ID NO: 1273 - protein, 20 aa, Artificial Sequence
  Synthetically generated peptide
  VARIANT (1)...(20): Xaa = Any Amino Acid
PGXTCGEXXICAYXAACTGC

SEQ ID NO: 1274 - protein, 20 aa, Artificial Sequence
  Synthetically generated peptide
  VARIANT (1)...(20): Xaa = Any Amino Acid
PGXTCGEXXICAYAXACTGC

SEQ ID NO: 1275 - protein, 20 aa, Artificial Sequence
  Synthetically generated peptide
  VARIANT (1)...(20): Xaa = Any Amino Acid
PGXTCGEXXICAYAAXCTGC

SEQ ID NO: 1276 - protein, 20 aa, Artificial Sequence
  Synthetically generated peptide
  VARIANT (1)...(20): Xaa = Any Amino Acid
PGXTCGEXXICAYAACXTGC

SEQ ID NO: 1277 - protein, 20 aa, Artificial Sequence
  Synthetically generated peptide
  VARIANT (1)...(20): Xaa = Any Amino Acid
PGXTCGEXXICAYAACTXGC

SEQ ID NO: 1278 - protein, 20 aa, Artificial Sequence
  Synthetically generated peptide
  VARIANT (1)...(20): Xaa = Any Amino Acid
PGXTCGEXXICAYAACTGXC

SEQ ID NO: 1279 - protein, 20 aa, Artificial Sequence
  Synthetically generated peptide
  VARIANT (1)...(20): Xaa = Any Amino Acid
PGXTCGEXXICAYAACTGCX

SEQ ID NO: 1280 - protein, 19 aa, Artificial Sequence
  Synthetically generated peptide
  VARIANT (1)...(19): Xaa = Any Amino Acid
PGXTCGEXIXCAYAACTGC

SEQ ID NO: 1281 - protein, 20 aa, Artificial Sequence
  Synthetically generated peptide
  VARIANT (1)...(20): Xaa = Any Amino Acid
PGXTCGEXIXXCAYAACTGC

SEQ ID NO: 1282 - protein, 20 aa, Artificial Sequence
  Synthetically generated peptide
  VARIANT (1)...(20): Xaa = Any Amino Acid
PGXTCGEXIXCXAYAACTGC

SEQ ID NO: 1283 - protein, 20 aa, Artificial Sequence
  Synthetically generated peptide
  VARIANT (1)...(20): Xaa = Any Amino Acid
PGXTCGEXIXCAXYAACTGC

SEQ ID NO: 1284 - protein, 20 aa, Artificial Sequence
  Synthetically generated peptide
  VARIANT (1)...(20): Xaa = Any Amino Acid
PGXTCGEXIXCAYXAACTGC

SEQ ID NO: 1285 - protein, 20 aa, Artificial Sequence
  Synthetically generated peptide
  VARIANT (1)...(20): Xaa = Any Amino Acid
PGXTCGEXIXCAYAXACTGC

SEQ ID NO: 1286 - protein, 20 aa, Artificial Sequence
  Synthetically generated peptide
  VARIANT (1)...(20): Xaa = Any Amino Acid
PGXTCGEXIXCAYAAXCTGC

SEQ ID NO: 1287 - protein, 20 aa, Artificial Sequence
  Synthetically generated peptide
  VARIANT (1)...(20): Xaa = Any Amino Acid
PGXTCGEXIXCAYAACXTGC

SEQ ID NO: 1288 - protein, 20 aa, Artificial Sequence
  Synthetically generated peptide
  VARIANT (1)...(20): Xaa = Any Amino Acid
PGXTCGEXIXCAYAACTXGC

SEQ ID NO: 1289 - protein, 20 aa, Artificial Sequence
  Synthetically generated peptide
  VARIANT (1)...(20): Xaa = Any Amino Acid
PGXTCGEXIXCAYAACTGXC

SEQ ID NO: 1290 - protein, 20 aa, Artificial Sequence
  Synthetically generated peptide
  VARIANT (1)...(20): Xaa = Any Amino Acid
PGXTCGEXIXCAYAACTGCX

SEQ ID NO: 1291 - protein, 19 aa, Artificial Sequence
  Synthetically generated peptide
  VARIANT (1)...(19): Xaa = Any Amino Acid
PGXTCGEXICXAYAACTGC

SEQ ID NO: 1292 - protein, 20 aa, Artificial Sequence
  Synthetically generated peptide
  VARIANT (1)...(20): Xaa = Any Amino Acid
PGXTCGEXICXXAYAACTGC

SEQ ID NO: 1293 - protein, 20 aa, Artificial Sequence
  Synthetically generated peptide
  VARIANT (1)...(20): Xaa = Any Amino Acid
PGXTCGEXICXAXYAACTGC

SEQ ID NO: 1294 - protein, 20 aa, Artificial Sequence
  Synthetically generated peptide
  VARIANT (1)...(20): Xaa = Any Amino Acid
PGXTCGEXICXAYXAACTGC

SEQ ID NO: 1295 - protein, 20 aa, Artificial Sequence
  Synthetically generated peptide
  VARIANT (1)...(20): Xaa = Any Amino Acid
PGXTCGEXICXAYAXACTGC

SEQ ID NO: 1296 - protein, 20 aa, Artificial Sequence
  Synthetically generated peptide
  VARIANT (1)...(20): Xaa = Any Amino Acid
PGXTCGEXICXAYAAXCTGC

SEQ ID NO: 1297 - protein, 20 aa, Artificial Sequence
  Synthetically generated peptide
  VARIANT (1)...(20): Xaa = Any Amino Acid
PGXTCGEXICXAYAACXTGC

SEQ ID NO: 1298 - protein, 20 aa, Artificial Sequence
  Synthetically generated peptide
  VARIANT (1)...(20): Xaa = Any Amino Acid
PGXTCGEXICXAYAACTXGC

SEQ ID NO: 1299 - protein, 20 aa, Artificial Sequence
  Synthetically generated peptide
  VARIANT (1)...(20): Xaa = Any Amino Acid
PGXTCGEXICXAYAACTGXC

SEQ ID NO: 1300 - protein, 20 aa, Artificial Sequence
  Synthetically generated peptide
  VARIANT (1)...(20): Xaa = Any Amino Acid
PGXTCGEXICXAYAACTGCX

SEQ ID NO: 1301 - protein, 19 aa, Artificial Sequence
  Synthetically generated peptide
  VARIANT (1)...(19): Xaa = Any Amino Acid
PGXTCGEXICAXYAACTGC

SEQ ID NO: 1302 - protein, 20 aa, Artificial Sequence
  Synthetically generated peptide
  VARIANT (1)...(20): Xaa = Any Amino Acid
PGXTCGEXICAXXYAACTGC

SEQ ID NO: 1303 - protein, 20 aa, Artificial Sequence
  Synthetically generated peptide
  VARIANT (1)...(20): Xaa = Any Amino Acid
PGXTCGEXICAXYXAACTGC

SEQ ID NO: 1304 - protein, 20 aa, Artificial Sequence
  Synthetically generated peptide
  VARIANT (1)...(20): Xaa = Any Amino Acid
PGXTCGEXICAXYAXACTGC

SEQ ID NO: 1305 - protein, 20 aa, Artificial Sequence
  Synthetically generated peptide
  VARIANT (1)...(20): Xaa = Any Amino Acid
PGXTCGEXICAXYAAXCTGC

SEQ ID NO: 1306 - protein, 20 aa, Artificial Sequence
  Synthetically generated peptide
  VARIANT (1)...(20): Xaa = Any Amino Acid
PGXTCGEXICAXYAACXTGC

SEQ ID NO: 1307 - protein, 20 aa, Artificial Sequence
  Synthetically generated peptide
  VARIANT (1)...(20): Xaa = Any Amino Acid
PGXTCGEXICAXYAACTXGC

SEQ ID NO: 1308 - protein, 20 aa, Artificial Sequence
  Synthetically generated peptide
  VARIANT (1)...(20): Xaa = Any Amino Acid
PGXTCGEXICAXYAACTGXC

SEQ ID NO: 1309 - protein, 20 aa, Artificial Sequence
  Synthetically generated peptide
  VARIANT (1)...(20): Xaa = Any Amino Acid
PGXTCGEXICAXYAACTGCX

SEQ ID NO: 1310 - protein, 19 aa, Artificial Sequence
  Synthetically generated peptide
  VARIANT (1)...(19): Xaa = Any Amino Acid
PGXTCGEXICAYXAACTGC

SEQ ID NO: 1311 - protein, 20 aa, Artificial Sequence
  Synthetically generated peptide
  VARIANT (1)...(20): Xaa = Any Amino Acid
PGXTCGEXICAYXXAACTGC

SEQ ID NO: 1312 - protein, 20 aa, Artificial Sequence
  Synthetically generated peptide
  VARIANT (1)...(20): Xaa = Any Amino Acid
PGXTCGEXICAYXAXACTGC

SEQ ID NO: 1313 - protein, 20 aa, Artificial Sequence
  Synthetically generated peptide
  VARIANT (1)...(20): Xaa = Any Amino Acid
PGXTCGEXICAYXAAXCTGC

SEQ ID NO: 1314 - protein, 20 aa, Artificial Sequence
  Synthetically generated peptide
  VARIANT (1)...(20): Xaa = Any Amino Acid
PGXTCGEXICAYXAACXTGC

SEQ ID NO: 1315 - protein, 20 aa, Artificial Sequence
  Synthetically generated peptide
  VARIANT (1)...(20): Xaa = Any Amino Acid
PGXTCGEXICAYXAACTXGC

SEQ ID NO: 1316 - protein, 20 aa, Artificial Sequence
  Synthetically generated peptide
  VARIANT (1)...(20): Xaa = Any Amino Acid
PGXTCGEXICAYXAACTGXC

SEQ ID NO: 1317 - protein, 20 aa, Artificial Sequence
  Synthetically generated peptide
  VARIANT (1)...(20): Xaa = Any Amino Acid
PGXTCGEXICAYXAACTGCX

SEQ ID NO: 1318 - protein, 19 aa, Artificial Sequence
  Synthetically generated peptide
  VARIANT (1)...(19): Xaa = Any Amino Acid
PGXTCGEXICAYAXACTGC

SEQ ID NO: 1319 - protein, 20 aa, Artificial Sequence
  Synthetically generated peptide
  VARIANT (1)...(20): Xaa = Any Amino Acid
PGXTCGEXICAYAXXACTGC

SEQ ID NO: 1320 - protein, 20 aa, Artificial Sequence
  Synthetically generated peptide
  VARIANT (1)...(20): Xaa = Any Amino Acid
PGXTCGEXICAYAXAXCTGC

SEQ ID NO: 1321 - protein, 20 aa, Artificial Sequence
  Synthetically generated peptide
  VARIANT (1)...(20): Xaa = Any Amino Acid
PGXTCGEXICAYAXACXTGC

SEQ ID NO: 1322 - protein, 20 aa, Artificial Sequence
  Synthetically generated peptide
  VARIANT (1)...(20): Xaa = Any Amino Acid
PGXTCGEXICAYAXACTXGC

SEQ ID NO: 1323 - protein, 20 aa, Artificial Sequence
  Synthetically generated peptide
  VARIANT (1)...(20): Xaa = Any Amino Acid
PGXTCGEXICAYAXACTGXC

SEQ ID NO: 1324 - protein, 20 aa, Artificial Sequence
  Synthetically generated peptide
  VARIANT (1)...(20): Xaa = Any Amino Acid
PGXTCGEXICAYAXACTGCX

SEQ ID NO: 1325 - protein, 19 aa, Artificial Sequence
  Synthetically generated peptide
  VARIANT (1)...(19): Xaa = Any Amino Acid
PGXTCGEXICAYAAXCTGC

SEQ ID NO: 1326 - protein, 20 aa, Artificial Sequence
  Synthetically generated peptide
  VARIANT (1)...(20): Xaa = Any Amino Acid
PGXTCGEXICAYAAXXCTGC

SEQ ID NO: 1327 - protein, 20 aa, Artificial Sequence
  Synthetically generated peptide
  VARIANT (1)...(20): Xaa = Any Amino Acid
PGXTCGEXICAYAAXCXTGC

SEQ ID NO: 1328 - protein, 20 aa, Artificial Sequence
  Synthetically generated peptide
  VARIANT (1)...(20): Xaa = Any Amino Acid
PGXTCGEXICAYAAXCTXGC

SEQ ID NO: 1329 - protein, 20 aa, Artificial Sequence
  Synthetically generated peptide
  VARIANT (1)...(20): Xaa = Any Amino Acid
PGXTCGEXICAYAAXCTGXC

SEQ ID NO: 1330 - protein, 20 aa, Artificial Sequence
  Synthetically generated peptide
  VARIANT (1)...(20): Xaa = Any Amino Acid
PGXTCGEXICAYAAXCTGCX

SEQ ID NO: 1331 - protein, 19 aa, Artificial Sequence
  Synthetically generated peptide
  VARIANT (1)...(19): Xaa = Any Amino Acid
PGXTCGEXICAYAACXTGC

SEQ ID NO: 1332 - protein, 20 aa, Artificial Sequence
  Synthetically generated peptide
  VARIANT (1)...(20): Xaa = Any Amino Acid
PGXTCGEXICAYAACXXTGC

SEQ ID NO: 1333 - protein, 20 aa, Artificial Sequence
  Synthetically generated peptide
  VARIANT (1)...(20): Xaa = Any Amino Acid
PGXTCGEXICAYAACXTXGC

SEQ ID NO: 1334 - protein, 20 aa, Artificial Sequence
  Synthetically generated peptide
  VARIANT (1)...(20): Xaa = Any Amino Acid
PGXTCGEXICAYAACXTGXC

SEQ ID NO: 1335 - protein, 20 aa, Artificial Sequence
  Synthetically generated peptide
  VARIANT (1)...(20): Xaa = Any Amino Acid
PGXTCGEXICAYAACXTGCX

SEQ ID NO: 1336 - protein, 19 aa, Artificial Sequence
  Synthetically generated peptide
  VARIANT (1)...(19): Xaa = Any Amino Acid
PGXTCGEXICAYAACTXGC

SEQ ID NO: 1337 - protein, 20 aa, Artificial Sequence
  Synthetically generated peptide
  VARIANT (1)...(20): Xaa = Any Amino Acid
PGXTCGEXICAYAACTXXGC

SEQ ID NO: 1338 - protein, 20 aa, Artificial Sequence
  Synthetically generated peptide
  VARIANT (1)...(20): Xaa = Any Amino Acid
PGXTCGEXICAYAACTXGXC

SEQ ID NO: 1339 - protein, 20 aa, Artificial Sequence
  Synthetically generated peptide
  VARIANT (1)...(20): Xaa = Any Amino Acid
PGXTCGEXICAYAACTXGCX

SEQ ID NO: 1340 - protein, 19 aa, Artificial Sequence
  Synthetically generated peptide
  VARIANT (1)...(19): Xaa = Any Amino Acid
PGXTCGEXICAYAACTGXC

SEQ ID NO: 1341 - protein, 20 aa, Artificial Sequence
  Synthetically generated peptide
  VARIANT (1)...(20): Xaa = Any Amino Acid
PGXTCGEXICAYAACTGXXC

SEQ ID NO: 1342 - protein, 20 aa, Artificial Sequence
  Synthetically generated peptide
  VARIANT (1)...(20): Xaa = Any Amino Acid
PGXTCGEXICAYAACTGXCX

SEQ ID NO: 1343 - protein, 19 aa, Artificial Sequence
  Synthetically generated peptide
  VARIANT (1)...(19): Xaa = Any Amino Acid
PGXTCGEXICAYAACTGCX

SEQ ID NO: 1344 - protein, 20 aa, Artificial Sequence
  Synthetically generated peptide
  VARIANT (1)...(20): Xaa = Any Amino Acid
PGXTCGEXICAYAACTGCXX

SEQ ID NO: 1345 - protein, 18 aa, Artificial Sequence
  Synthetically generated peptide
  VARIANT (1)...(18): Xaa = Any Amino Acid
PGXTCGEIXCAYAACTGC

SEQ ID NO: 1346 - protein, 19 aa, Artificial Sequence
  Synthetically generated peptide
  VARIANT (1)...(19): Xaa = Any Amino Acid
PGXTCGEIXXCAYAACTGC

SEQ ID NO: 1347 - protein, 20 aa, Artificial Sequence
  Synthetically generated peptide
  VARIANT (1)...(20): Xaa = Any Amino Acid
PGXTCGEIXXXCAYAACTGC

SEQ ID NO: 1348 - protein, 20 aa, Artificial Sequence
  Synthetically generated peptide
  VARIANT (1)...(20): Xaa = Any Amino Acid
PGXTCGEIXXCXAYAACTGC

SEQ ID NO: 1349 - protein, 20 aa, Artificial Sequence
  Synthetically generated peptide
  VARIANT (1)...(20): Xaa = Any Amino Acid
PGXTCGEIXXCAXYAACTGC

SEQ ID NO: 1350 - protein, 20 aa, Artificial Sequence
  Synthetically generated peptide
  VARIANT (1)...(20): Xaa = Any Amino Acid
PGXTCGEIXXCAYXAACTGC

SEQ ID NO: 1351 - protein, 20 aa, Artificial Sequence
  Synthetically generated peptide
  VARIANT (1)...(20): Xaa = Any Amino Acid
PGXTCGEIXXCAYAXACTGC

SEQ ID NO: 1352 - protein, 20 aa, Artificial Sequence
  Synthetically generated peptide
  VARIANT (1)...(20): Xaa = Any Amino Acid
PGXTCGEIXXCAYAAXCTGC

SEQ ID NO: 1353 - protein, 20 aa, Artificial Sequence
  Synthetically generated peptide
  VARIANT (1)...(20): Xaa = Any Amino Acid
PGXTCGEIXXCAYAACXTGC

SEQ ID NO: 1354 - protein, 20 aa, Artificial Sequence
  Synthetically generated peptide
  VARIANT (1)...(20): Xaa = Any Amino Acid
PGXTCGEIXXCAYAACTXGC

SEQ ID NO: 1355 - protein, 20 aa, Artificial Sequence
  Synthetically generated peptide
  VARIANT (1)...(20): Xaa = Any Amino Acid
PGXTCGEIXXCAYAACTGXC

SEQ ID NO: 1356 - protein, 20 aa, Artificial Sequence
  Synthetically generated peptide
  VARIANT (1)...(20): Xaa = Any Amino Acid
PGXTCGEIXXCAYAACTGCX

SEQ ID NO: 1357 - protein, 19 aa, Artificial Sequence
  Synthetically generated peptide
  VARIANT (1)...(19): Xaa = Any Amino Acid
PGXTCGEIXCXAYAACTGC

SEQ ID NO: 1358 - protein, 20 aa, Artificial Sequence
  Synthetically generated peptide
  VARIANT (1)...(20): Xaa = Any Amino Acid
PGXTCGEIXCXXAYAACTGC

SEQ ID NO: 1359 - protein, 20 aa, Artificial Sequence
  Synthetically generated peptide
  VARIANT (1)...(20): Xaa = Any Amino Acid
PGXTCGEIXCXAXYAACTGC

SEQ ID NO: 1360 - protein, 20 aa, Artificial Sequence
  Synthetically generated peptide
  VARIANT (1)...(20): Xaa = Any Amino Acid
PGXTCGEIXCXAYXAACTGC

SEQ ID NO: 1361 - protein, 20 aa, Artificial Sequence
  Synthetically generated peptide
  VARIANT (1)...(20): Xaa = Any Amino Acid
PGXTCGEIXCXAYAXACTGC

SEQ ID NO: 1362 - protein, 20 aa, Artificial Sequence
  Synthetically generated peptide
  VARIANT (1)...(20): Xaa = Any Amino Acid
PGXTCGEIXCXAYAAXCTGC

SEQ ID NO: 1363 - protein, 20 aa, Artificial Sequence
  Synthetically generated peptide
  VARIANT (1)...(20): Xaa = Any Amino Acid
PGXTCGEIXCXAYAACXTGC

SEQ ID NO: 1364 - protein, 20 aa, Artificial Sequence
  Synthetically generated peptide
  VARIANT (1)...(20): Xaa = Any Amino Acid
PGXTCGEIXCXAYAACTXGC

SEQ ID NO: 1365 - protein, 20 aa, Artificial Sequence
  Synthetically generated peptide
  VARIANT (1)...(20): Xaa = Any Amino Acid
PGXTCGEIXCXAYAACTGXC

SEQ ID NO: 1366 - protein, 20 aa, Artificial Sequence
  Synthetically generated peptide
  VARIANT (1)...(20): Xaa = Any Amino Acid
PGXTCGEIXCXAYAACTGCX

SEQ ID NO: 1367 - protein, 19 aa, Artificial Sequence
  Synthetically generated peptide
  VARIANT (1)...(19): Xaa = Any Amino Acid
PGXTCGEIXCAXYAACTGC

SEQ ID NO: 1368 - protein, 20 aa, Artificial Sequence
  Synthetically generated peptide
  VARIANT (1)...(20): Xaa = Any Amino Acid
PGXTCGEIXCAXXYAACTGC

SEQ ID NO: 1369 - protein, 20 aa, Artificial Sequence
  Synthetically generated peptide
  VARIANT (1)...(20): Xaa = Any Amino Acid
PGXTCGEIXCAXYXAACTGC

SEQ ID NO: 1370 - protein, 20 aa, Artificial Sequence
  Synthetically generated peptide
  VARIANT (1)...(20): Xaa = Any Amino Acid
PGXTCGEIXCAXYAXACTGC

SEQ ID NO: 1371 - protein, 20 aa, Artificial Sequence
  Synthetically generated peptide
  VARIANT (1)...(20): Xaa = Any Amino Acid
PGXTCGEIXCAXYAAXCTGC

SEQ ID NO: 1372 - protein, 20 aa, Artificial Sequence
  Synthetically generated peptide
  VARIANT (1)...(20): Xaa = Any Amino Acid
PGXTCGEIXCAXYAACXTGC

SEQ ID NO: 1373 - protein, 20 aa, Artificial Sequence
  Synthetically generated peptide
  VARIANT (1)...(20): Xaa = Any Amino Acid
PGXTCGEIXCAXYAACTXGC

SEQ ID NO: 1374 - protein, 20 aa, Artificial Sequence
  Synthetically generated peptide
  VARIANT (1)...(20): Xaa = Any Amino Acid
PGXTCGEIXCAXYAACTGXC

SEQ ID NO: 1375 - protein, 20 aa, Artificial Sequence
  Synthetically generated peptide
  VARIANT (1)...(20): Xaa = Any Amino Acid
PGXTCGEIXCAXYAACTGCX

SEQ ID NO: 1376 - protein, 19 aa, Artificial Sequence
  Synthetically generated peptide
  VARIANT (1)...(19): Xaa = Any Amino Acid
PGXTCGEIXCAYXAACTGC

SEQ ID NO: 1377 - protein, 20 aa, Artificial Sequence
  Synthetically generated peptide
  VARIANT (1)...(20): Xaa = Any Amino Acid
PGXTCGEIXCAYXXAACTGC

SEQ ID NO: 1378 - protein, 20 aa, Artificial Sequence
  Synthetically generated peptide
  VARIANT (1)...(20): Xaa = Any Amino Acid
PGXTCGEIXCAYXAXACTGC

SEQ ID NO: 1379 - protein, 20 aa, Artificial Sequence
  Synthetically generated peptide
  VARIANT (1)...(20): Xaa = Any Amino Acid
PGXTCGEIXCAYXAAXCTGC

SEQ ID NO: 1380 - protein, 20 aa, Artificial Sequence
  Synthetically generated peptide
  VARIANT (1)...(20): Xaa = Any Amino Acid
PGXTCGEIXCAYXAACXTGC

SEQ ID NO: 1381 - protein, 20 aa, Artificial Sequence
  Synthetically generated peptide
  VARIANT (1)...(20): Xaa = Any Amino Acid
PGXTCGEIXCAYXAACTXGC

SEQ ID NO: 1382 - protein, 20 aa, Artificial Sequence
  Synthetically generated peptide
  VARIANT (1)...(20): Xaa = Any Amino Acid
PGXTCGEIXCAYXAACTGXC

SEQ ID NO: 1383 - protein, 20 aa, Artificial Sequence
  Synthetically generated peptide
  VARIANT (1)...(20): Xaa = Any Amino Acid
PGXTCGEIXCAYXAACTGCX

SEQ ID NO: 1384 - protein, 19 aa, Artificial Sequence
  Synthetically generated peptide
  VARIANT (1)...(19): Xaa = Any Amino Acid
PGXTCGEIXCAYAXACTGC

SEQ ID NO: 1385 - protein, 20 aa, Artificial Sequence
  Synthetically generated peptide
  VARIANT (1)...(20): Xaa = Any Amino Acid
PGXTCGEIXCAYAXXACTGC

SEQ ID NO: 1386 - protein, 20 aa, Artificial Sequence
  Synthetically generated peptide
  VARIANT (1)...(20): Xaa = Any Amino Acid
PGXTCGEIXCAYAXAXCTGC

SEQ ID NO: 1387 - protein, 20 aa, Artificial Sequence
  Synthetically generated peptide
  VARIANT (1)...(20): Xaa = Any Amino Acid
PGXTCGEIXCAYAXACXTGC

SEQ ID NO: 1388 - protein, 20 aa, Artificial Sequence
  Synthetically generated peptide
  VARIANT (1)...(20): Xaa = Any Amino Acid
PGXTCGEIXCAYAXACTXGC

SEQ ID NO: 1389 - protein, 20 aa, Artificial Sequence
  Synthetically generated peptide
  VARIANT (1)...(20): Xaa = Any Amino Acid
PGXTCGEIXCAYAXACTGXC

SEQ ID NO: 1390 - protein, 20 aa, Artificial Sequence
  Synthetically generated peptide
  VARIANT (1)...(20): Xaa = Any Amino Acid
PGXTCGEIXCAYAXACTGCX

SEQ ID NO: 1391 - protein, 19 aa, Artificial Sequence
  Synthetically generated peptide
  VARIANT (1)...(19): Xaa = Any Amino Acid
PGXTCGEIXCAYAAXCTGC

SEQ ID NO: 1392 - protein, 20 aa, Artificial Sequence
  Synthetically generated peptide
  VARIANT (1)...(20): Xaa = Any Amino Acid
PGXTCGEIXCAYAAXXCTGC

SEQ ID NO: 1393 - protein, 20 aa, Artificial Sequence
  Synthetically generated peptide
  VARIANT (1)...(20): Xaa = Any Amino Acid
PGXTCGEIXCAYAAXCXTGC

SEQ ID NO: 1394 - protein, 20 aa, Artificial Sequence
  Synthetically generated peptide
  VARIANT (1)...(20): Xaa = Any Amino Acid
PGXTCGEIXCAYAAXCTXGC

SEQ ID NO: 1395 - protein, 20 aa, Artificial Sequence
  Synthetically generated peptide
  VARIANT (1)...(20): Xaa = Any Amino Acid
PGXTCGEIXCAYAAXCTGXC

SEQ ID NO: 1396 - protein, 20 aa, Artificial Sequence
  Synthetically generated peptide
  VARIANT (1)...(20): Xaa = Any Amino Acid
PGXTCGEIXCAYAAXCTGCX

SEQ ID NO: 1397 - protein, 19 aa, Artificial Sequence
  Synthetically generated peptide
  VARIANT (1)...(19): Xaa = Any Amino Acid
PGXTCGEIXCAYAACXTGC

SEQ ID NO: 1398 - protein, 20 aa, Artificial Sequence
  Synthetically generated peptide
  VARIANT (1)...(20): Xaa = Any Amino Acid
PGXTCGEIXCAYAACXXTGC

SEQ ID NO: 1399 - protein, 20 aa, Artificial Sequence
  Synthetically generated peptide
  VARIANT (1)...(20): Xaa = Any Amino Acid
PGXTCGEIXCAYAACXTXGC

SEQ ID NO: 1400 - protein, 20 aa, Artificial Sequence
  Synthetically generated peptide
  VARIANT (1)...(20): Xaa = Any Amino Acid
PGXTCGEIXCAYAACXTGXC

SEQ ID NO: 1401 - protein, 20 aa, Artificial Sequence
  Synthetically generated peptide
  VARIANT (1)...(20): Xaa = Any Amino Acid
PGXTCGEIXCAYAACXTGCX

SEQ ID NO: 1402 - protein, 19 aa, Artificial Sequence
  Synthetically generated peptide
  VARIANT (1)...(19): Xaa = Any Amino Acid
PGXTCGEIXCAYAACTXGC

SEQ ID NO: 1403 - protein, 20 aa, Artificial Sequence
  Synthetically generated peptide
  VARIANT (1)...(20): Xaa = Any Amino Acid
PGXTCGEIXCAYAACTXXGC

SEQ ID NO: 1404 - protein, 20 aa, Artificial Sequence
  Synthetically generated peptide
  VARIANT (1)...(20): Xaa = Any Amino Acid
PGXTCGEIXCAYAACTXGXC

SEQ ID NO: 1405 - protein, 20 aa, Artificial Sequence
  Synthetically generated peptide
  VARIANT (1)...(20): Xaa = Any Amino Acid
PGXTCGEIXCAYAACTXGCX

SEQ ID NO: 1406 - protein, 19 aa, Artificial Sequence
  Synthetically generated peptide
  VARIANT (1)...(19): Xaa = Any Amino Acid
PGXTCGEIXCAYAACTGXC

SEQ ID NO: 1407 - protein, 20 aa, Artificial Sequence
  Synthetically generated peptide
  VARIANT (1)...(20): Xaa = Any Amino Acid
PGXTCGEIXCAYAACTGXXC

SEQ ID NO: 1408 - protein, 20 aa, Artificial Sequence
  Synthetically generated peptide
  VARIANT (1)...(20): Xaa = Any Amino Acid
PGXTCGEIXCAYAACTGXCX

SEQ ID NO: 1409 - protein, 19 aa, Artificial Sequence
  Synthetically generated peptide
  VARIANT (1)...(19): Xaa = Any Amino Acid
PGXTCGEIXCAYAACTGCX

SEQ ID NO: 1410 - protein, 20 aa, Artificial Sequence
  Synthetically generated peptide
  VARIANT (1)...(20): Xaa = Any Amino Acid
PGXTCGEIXCAYAACTGCXX

SEQ ID NO: 1411 - protein, 18 aa, Artificial Sequence
  Synthetically generated peptide
  VARIANT (1)...(18): Xaa = Any Amino Acid
PGXTCGEICXAYAACTGC

SEQ ID NO: 1412 - protein, 19 aa, Artificial Sequence
  Synthetically generated peptide
  VARIANT (1)...(19): Xaa = Any Amino Acid
PGXTCGEICXXAYAACTGC

SEQ ID NO: 1413 - protein, 20 aa, Artificial Sequence
  Synthetically generated peptide
  VARIANT (1)...(20): Xaa = Any Amino Acid
PGXTCGEICXXXAYAACTGC

SEQ ID NO: 1414 - protein, 20 aa, Artificial Sequence
  Synthetically generated peptide
  VARIANT (1)...(20): Xaa = Any Amino Acid
PGXTCGEICXXAXYAACTGC

SEQ ID NO: 1415 - protein, 20 aa, Artificial Sequence
  Synthetically generated peptide
  VARIANT (1)...(20): Xaa = Any Amino Acid
PGXTCGEICXXAYXAACTGC

SEQ ID NO: 1416 - protein, 20 aa, Artificial Sequence
  Synthetically generated peptide
  VARIANT (1)...(20): Xaa = Any Amino Acid
PGXTCGEICXXAYAXACTGC

SEQ ID NO: 1417 - protein, 20 aa, Artificial Sequence
  Synthetically generated peptide
  VARIANT (1)...(20): Xaa = Any Amino Acid
PGXTCGEICXXAYAAXCTGC

SEQ ID NO: 1418 - protein, 20 aa, Artificial Sequence
  Synthetically generated peptide
  VARIANT (1)...(20): Xaa = Any Amino Acid
PGXTCGEICXXAYAACXTGC

SEQ ID NO: 1419 - protein, 20 aa, Artificial Sequence
  Synthetically generated peptide
  VARIANT (1)...(20): Xaa = Any Amino Acid
PGXTCGEICXXAYAACTXGC

SEQ ID NO: 1420 - protein, 20 aa, Artificial Sequence
  Synthetically generated peptide
  VARIANT (1)...(20): Xaa = Any Amino Acid
PGXTCGEICXXAYAACTGXC

SEQ ID NO: 1421 - protein, 20 aa, Artificial Sequence
  Synthetically generated peptide
  VARIANT (1)...(20): Xaa = Any Amino Acid
PGXTCGEICXXAYAACTGCX

SEQ ID NO: 1422 - protein, 19 aa, Artificial Sequence
  Synthetically generated peptide
  VARIANT (1)...(19): Xaa = Any Amino Acid
PGXTCGEICXAXYAACTGC

SEQ ID NO: 1423 - protein, 20 aa, Artificial Sequence
  Synthetically generated peptide
  VARIANT (1)...(20): Xaa = Any Amino Acid
PGXTCGEICXAXXYAACTGC

SEQ ID NO: 1424 - protein, 20 aa, Artificial Sequence
  Synthetically generated peptide
  VARIANT (1)...(20): Xaa = Any Amino Acid
PGXTCGEICXAXYXAACTGC

SEQ ID NO: 1425 - protein, 20 aa, Artificial Sequence
  Synthetically generated peptide
  VARIANT (1)...(20): Xaa = Any Amino Acid
PGXTCGEICXAXYAXACTGC

SEQ ID NO: 1426 - protein, 20 aa, Artificial Sequence
  Synthetically generated peptide
  VARIANT (1)...(20): Xaa = Any Amino Acid
PGXTCGEICXAXYAAXCTGC

SEQ ID NO: 1427 - protein, 20 aa, Artificial Sequence
  Synthetically generated peptide
  VARIANT (1)...(20): Xaa = Any Amino Acid
PGXTCGEICXAXYAACXTGC

SEQ ID NO: 1428 - protein, 20 aa, Artificial Sequence
  Synthetically generated peptide
  VARIANT (1)...(20): Xaa = Any Amino Acid
PGXTCGEICXAXYAACTXGC

SEQ ID NO: 1429 - protein, 20 aa, Artificial Sequence
  Synthetically generated peptide
  VARIANT (1)...(20): Xaa = Any Amino Acid
PGXTCGEICXAXYAACTGXC

SEQ ID NO: 1430 - protein, 20 aa, Artificial Sequence
  Synthetically generated peptide
  VARIANT (1)...(20): Xaa = Any Amino Acid
PGXTCGEICXAXYAACTGCX

SEQ ID NO: 1431 - protein, 19 aa, Artificial Sequence
  Synthetically generated peptide
  VARIANT (1)...(19): Xaa = Any Amino Acid
PGXTCGEICXAYXAACTGC

SEQ ID NO: 1432 - protein, 20 aa, Artificial Sequence
  Synthetically generated peptide
  VARIANT (1)...(20): Xaa = Any Amino Acid
PGXTCGEICXAYXXAACTGC

SEQ ID NO: 1433 - protein, 20 aa, Artificial Sequence
  Synthetically generated peptide
  VARIANT (1)...(20): Xaa = Any Amino Acid
PGXTCGEICXAYXAXACTGC

SEQ ID NO: 1434 - protein, 20 aa, Artificial Sequence
  Synthetically generated peptide
  VARIANT (1)...(20): Xaa = Any Amino Acid
PGXTCGEICXAYXAAXCTGC

SEQ ID NO: 1435 - protein, 20 aa, Artificial Sequence
  Synthetically generated peptide
  VARIANT (1)...(20): Xaa = Any Amino Acid
PGXTCGEICXAYXAACXTGC

SEQ ID NO: 1436 - protein, 20 aa, Artificial Sequence
  Synthetically generated peptide
  VARIANT (1)...(20): Xaa = Any Amino Acid
PGXTCGEICXAYXAACTXGC

SEQ ID NO: 1437 - protein, 20 aa, Artificial Sequence
  Synthetically generated peptide
  VARIANT (1)...(20): Xaa = Any Amino Acid
PGXTCGEICXAYXAACTGXC

SEQ ID NO: 1438 - protein, 20 aa, Artificial Sequence
  Synthetically generated peptide
  VARIANT (1)...(20): Xaa = Any Amino Acid
PGXTCGEICXAYXAACTGCX

SEQ ID NO: 1439 - protein, 19 aa, Artificial Sequence
  Synthetically generated peptide
  VARIANT (1)...(19): Xaa = Any Amino Acid
PGXTCGEICXAYAXACTGC

SEQ ID NO: 1440 - protein, 20 aa, Artificial Sequence
  Synthetically generated peptide
  VARIANT (1)...(20): Xaa = Any Amino Acid
PGXTCGEICXAYAXXACTGC

SEQ ID NO: 1441 - protein, 20 aa, Artificial Sequence
  Synthetically generated peptide
  VARIANT (1)...(20): Xaa = Any Amino Acid
PGXTCGEICXAYAXAXCTGC

SEQ ID NO: 1442 - protein, 20 aa, Artificial Sequence
  Synthetically generated peptide
  VARIANT (1)...(20): Xaa = Any Amino Acid
PGXTCGEICXAYAXACXTGC

SEQ ID NO: 1443 - protein, 20 aa, Artificial Sequence
  Synthetically generated peptide
  VARIANT (1)...(20): Xaa = Any Amino Acid
PGXTCGEICXAYAXACTXGC

SEQ ID NO: 1444 - protein, 20 aa, Artificial Sequence
  Synthetically generated peptide
  VARIANT (1)...(20): Xaa = Any Amino Acid
PGXTCGEICXAYAXACTGXC

SEQ ID NO: 1445 - protein, 20 aa, Artificial Sequence
  Synthetically generated peptide
  VARIANT (1)...(20): Xaa = Any Amino Acid
PGXTCGEICXAYAXACTGCX

SEQ ID NO: 1446 - protein, 19 aa, Artificial Sequence
  Synthetically generated peptide
  VARIANT (1)...(19): Xaa = Any Amino Acid
PGXTCGEICXAYAAXCTGC

SEQ ID NO: 1447 - protein, 20 aa, Artificial Sequence
  Synthetically generated peptide
  VARIANT (1)...(20): Xaa = Any Amino Acid
PGXTCGEICXAYAAXXCTGC

SEQ ID NO: 1448 - protein, 20 aa, Artificial Sequence
  Synthetically generated peptide
  VARIANT (1)...(20): Xaa = Any Amino Acid
PGXTCGEICXAYAAXCXTGC

SEQ ID NO: 1449 - protein, 20 aa, Artificial Sequence
  Synthetically generated peptide
  VARIANT (1)...(20): Xaa = Any Amino Acid
PGXTCGEICXAYAAXCTXGC

SEQ ID NO: 1450 - protein, 20 aa, Artificial Sequence
  Synthetically generated peptide
  VARIANT (1)...(20): Xaa = Any Amino Acid
PGXTCGEICXAYAAXCTGXC

SEQ ID NO: 1451 - protein, 20 aa, Artificial Sequence
  Synthetically generated peptide
  VARIANT (1)...(20): Xaa = Any Amino Acid
PGXTCGEICXAYAAXCTGCX

SEQ ID NO: 1452 - protein, 19 aa, Artificial Sequence
  Synthetically generated peptide
  VARIANT (1)...(19): Xaa = Any Amino Acid
PGXTCGEICXAYAACXTGC

SEQ ID NO: 1453 - protein, 20 aa, Artificial Sequence
  Synthetically generated peptide
  VARIANT (1)...(20): Xaa = Any Amino Acid
PGXTCGEICXAYAACXXTGC

SEQ ID NO: 1454 - protein, 20 aa, Artificial Sequence
  Synthetically generated peptide
  VARIANT (1)...(20): Xaa = Any Amino Acid
PGXTCGEICXAYAACXTXGC

SEQ ID NO: 1455 - protein, 20 aa, Artificial Sequence
  Synthetically generated peptide
  VARIANT (1)...(20): Xaa = Any Amino Acid
PGXTCGEICXAYAACXTGXC

SEQ ID NO: 1456 - protein, 20 aa, Artificial Sequence
  Synthetically generated peptide
  VARIANT (1)...(20): Xaa = Any Amino Acid
PGXTCGEICXAYAACXTGCX

SEQ ID NO: 1457 - protein, 19 aa, Artificial Sequence
  Synthetically generated peptide
  VARIANT (1)...(19): Xaa = Any Amino Acid
PGXTCGEICXAYAACTXGC

SEQ ID NO: 1458 - protein, 20 aa, Artificial Sequence
  Synthetically generated peptide
  VARIANT (1)...(20): Xaa = Any Amino Acid
PGXTCGEICXAYAACTXXGC

SEQ ID NO: 1459 - protein, 20 aa, Artificial Sequence
  Synthetically generated peptide
  VARIANT (1)...(20): Xaa = Any Amino Acid
PGXTCGEICXAYAACTXGXC

SEQ ID NO: 1460 - protein, 20 aa, Artificial Sequence
  Synthetically generated peptide
  VARIANT (1)...(20): Xaa = Any Amino Acid
PGXTCGEICXAYAACTXGCX

SEQ ID NO: 1461 - protein, 19 aa, Artificial Sequence
  Synthetically generated peptide
  VARIANT (1)...(19): Xaa = Any Amino Acid
PGXTCGEICXAYAACTGXC

SEQ ID NO: 1462 - protein, 20 aa, Artificial Sequence
  Synthetically generated peptide
  VARIANT (1)...(20): Xaa = Any Amino Acid
PGXTCGEICXAYAACTGXXC

SEQ ID NO: 1463 - protein, 20 aa, Artificial Sequence
  Synthetically generated peptide
  VARIANT (1)...(20): Xaa = Any Amino Acid
PGXTCGEICXAYAACTGXCX

SEQ ID NO: 1464 - protein, 19 aa, Artificial Sequence
  Synthetically generated peptide
  VARIANT (1)...(19): Xaa = Any Amino Acid
PGXTCGEICXAYAACTGCX

SEQ ID NO: 1465 - protein, 20 aa, Artificial Sequence
  Synthetically generated peptide
  VARIANT (1)...(20): Xaa = Any Amino Acid
PGXTCGEICXAYAACTGCXX

SEQ ID NO: 1466 - protein, 18 aa, Artificial Sequence
  Synthetically generated peptide
  VARIANT (1)...(18): Xaa = Any Amino Acid
PGXTCGEICAXYAACTGC

SEQ ID NO: 1467 - protein, 19 aa, Artificial Sequence
  Synthetically generated peptide
  VARIANT (1)...(19): Xaa = Any Amino Acid
PGXTCGEICAXXYAACTGC

SEQ ID NO: 1468 - protein, 20 aa, Artificial Sequence
  Synthetically generated peptide
  VARIANT (1)...(20): Xaa = Any Amino Acid
PGXTCGEICAXXXYAACTGC

SEQ ID NO: 1469 - protein, 20 aa, Artificial Sequence
  Synthetically generated peptide
  VARIANT (1)...(20): Xaa = Any Amino Acid
PGXTCGEICAXXYXAACTGC

SEQ ID NO: 1470 - protein, 20 aa, Artificial Sequence
  Synthetically generated peptide
  VARIANT (1)...(20): Xaa = Any Amino Acid
PGXTCGEICAXXYAXACTGC

SEQ ID NO: 1471 - protein, 20 aa, Artificial Sequence
  Synthetically generated peptide
  VARIANT (1)...(20): Xaa = Any Amino Acid
PGXTCGEICAXXYAAXCTGC

SEQ ID NO: 1472 - protein, 20 aa, Artificial Sequence
  Synthetically generated peptide
  VARIANT (1)...(20): Xaa = Any Amino Acid
PGXTCGEICAXXYAACXTGC

SEQ ID NO: 1473 - protein, 20 aa, Artificial Sequence
  Synthetically generated peptide
  VARIANT (1)...(20): Xaa = Any Amino Acid
PGXTCGEICAXXYAACTXGC

SEQ ID NO: 1474 - protein, 20 aa, Artificial Sequence
  Synthetically generated peptide
  VARIANT (1)...(20): Xaa = Any Amino Acid
PGXTCGEICAXXYAACTGXC

SEQ ID NO: 1475 - protein, 20 aa, Artificial Sequence
  Synthetically generated peptide
  VARIANT (1)...(20): Xaa = Any Amino Acid
PGXTCGEICAXXYAACTGCX

SEQ ID NO: 1476 - protein, 19 aa, Artificial Sequence
  Synthetically generated peptide
  VARIANT (1)...(19): Xaa = Any Amino Acid
PGXTCGEICAXYXAACTGC

SEQ ID NO: 1477 - protein, 20 aa, Artificial Sequence
  Synthetically generated peptide
  VARIANT (1)...(20): Xaa = Any Amino Acid
PGXTCGEICAXYXXAACTGC

SEQ ID NO: 1478 - protein, 20 aa, Artificial Sequence
  Synthetically generated peptide
  VARIANT (1)...(20): Xaa = Any Amino Acid
PGXTCGEICAXYXAXACTGC

SEQ ID NO: 1479 - protein, 20 aa, Artificial Sequence
  Synthetically generated peptide
  VARIANT (1)...(20): Xaa = Any Amino Acid
PGXTCGEICAXYXAAXCTGC

SEQ ID NO: 1480 - protein, 20 aa, Artificial Sequence
  Synthetically generated peptide
  VARIANT (1)...(20): Xaa = Any Amino Acid
PGXTCGEICAXYXAACXTGC

SEQ ID NO: 1481 - protein, 20 aa, Artificial Sequence
  Synthetically generated peptide
  VARIANT (1)...(20): Xaa = Any Amino Acid
PGXTCGEICAXYXAACTXGC

SEQ ID NO: 1482 - protein, 20 aa, Artificial Sequence
  Synthetically generated peptide
  VARIANT (1)...(20): Xaa = Any Amino Acid
PGXTCGEICAXYXAACTGXC

SEQ ID NO: 1483 - protein, 20 aa, Artificial Sequence
  Synthetically generated peptide
  VARIANT (1)...(20): Xaa = Any Amino Acid
PGXTCGEICAXYXAACTGCX

SEQ ID NO: 1484 - protein, 19 aa, Artificial Sequence
  Synthetically generated peptide
  VARIANT (1)...(19): Xaa = Any Amino Acid
PGXTCGEICAXYAXACTGC

SEQ ID NO: 1485 - protein, 20 aa, Artificial Sequence
  Synthetically generated peptide
  VARIANT (1)...(20): Xaa = Any Amino Acid
PGXTCGEICAXYAXXACTGC

SEQ ID NO: 1486 - protein, 20 aa, Artificial Sequence
  Synthetically generated peptide
  VARIANT (1)...(20): Xaa = Any Amino Acid
PGXTCGEICAXYAXAXCTGC

SEQ ID NO: 1487 - protein, 20 aa, Artificial Sequence
  Synthetically generated peptide
  VARIANT (1)...(20): Xaa = Any Amino Acid
PGXTCGEICAXYAXACXTGC

SEQ ID NO: 1488 - protein, 20 aa, Artificial Sequence
  Synthetically generated peptide
  VARIANT (1)...(20): Xaa = Any Amino Acid
PGXTCGEICAXYAXACTXGC

SEQ ID NO: 1489 - protein, 20 aa, Artificial Sequence
  Synthetically generated peptide
  VARIANT (1)...(20): Xaa = Any Amino Acid
PGXTCGEICAXYAXACTGXC

SEQ ID NO: 1490 - protein, 20 aa, Artificial Sequence
  Synthetically generated peptide
  VARIANT (1)...(20): Xaa = Any Amino Acid
PGXTCGEICAXYAXACTGCX

SEQ ID NO: 1491 - protein, 19 aa, Artificial Sequence
  Synthetically generated peptide
  VARIANT (1)...(19): Xaa = Any Amino Acid
PGXTCGEICAXYAAXCTGC

SEQ ID NO: 1492 - protein, 20 aa, Artificial Sequence
  Synthetically generated peptide
  VARIANT (1)...(20): Xaa = Any Amino Acid
PGXTCGEICAXYAAXXCTGC

SEQ ID NO: 1493 - protein, 20 aa, Artificial Sequence
  Synthetically generated peptide
  VARIANT (1)...(20): Xaa = Any Amino Acid
PGXTCGEICAXYAAXCXTGC

SEQ ID NO: 1494 - protein, 20 aa, Artificial Sequence
  Synthetically generated peptide
  VARIANT (1)...(20): Xaa = Any Amino Acid
PGXTCGEICAXYAAXCTXGC

SEQ ID NO: 1495 - protein, 20 aa, Artificial Sequence
  Synthetically generated peptide
  VARIANT (1)...(20): Xaa = Any Amino Acid
PGXTCGEICAXYAAXCTGXC

SEQ ID NO: 1496 - protein, 20 aa, Artificial Sequence
  Synthetically generated peptide
  VARIANT (1)...(20): Xaa = Any Amino Acid
PGXTCGEICAXYAAXCTGCX

SEQ ID NO: 1497 - protein, 19 aa, Artificial Sequence
  Synthetically generated peptide
  VARIANT (1)...(19): Xaa = Any Amino Acid
PGXTCGEICAXYAACXTGC

SEQ ID NO: 1498 - protein, 20 aa, Artificial Sequence
  Synthetically generated peptide
  VARIANT (1)...(20): Xaa = Any Amino Acid
PGXTCGEICAXYAACXXTGC

SEQ ID NO: 1499 - protein, 20 aa, Artificial Sequence
  Synthetically generated peptide
  VARIANT (1)...(20): Xaa = Any Amino Acid
PGXTCGEICAXYAACXTXGC

SEQ ID NO: 1500 - protein, 20 aa, Artificial Sequence
  Synthetically generated peptide
  VARIANT (1)...(20): Xaa = Any Amino Acid
PGXTCGEICAXYAACXTGXC

SEQ ID NO: 1501 - protein, 20 aa, Artificial Sequence
  Synthetically generated peptide
  VARIANT (1)...(20): Xaa = Any Amino Acid
PGXTCGEICAXYAACXTGCX

SEQ ID NO: 1502 - protein, 19 aa, Artificial Sequence
  Synthetically generated peptide
  VARIANT (1)...(19): Xaa = Any Amino Acid
PGXTCGEICAXYAACTXGC

SEQ ID NO: 1503 - protein, 20 aa, Artificial Sequence
  Synthetically generated peptide
  VARIANT (1)...(20): Xaa = Any Amino Acid
PGXTCGEICAXYAACTXXGC

SEQ ID NO: 1504 - protein, 20 aa, Artificial Sequence
  Synthetically generated peptide
  VARIANT (1)...(20): Xaa = Any Amino Acid
PGXTCGEICAXYAACTXGXC

SEQ ID NO: 1505 - protein, 20 aa, Artificial Sequence
  Synthetically generated peptide
  VARIANT (1)...(20): Xaa = Any Amino Acid
PGXTCGEICAXYAACTXGCX

SEQ ID NO: 1506 - protein, 19 aa, Artificial Sequence
  Synthetically generated peptide
  VARIANT (1)...(19): Xaa = Any Amino Acid
PGXTCGEICAXYAACTGXC

SEQ ID NO: 1507 - protein, 20 aa, Artificial Sequence
  Synthetically generated peptide
  VARIANT (1)...(20): Xaa = Any Amino Acid
PGXTCGEICAXYAACTGXXC

SEQ ID NO: 1508 - protein, 20 aa, Artificial Sequence
  Synthetically generated peptide
  VARIANT (1)...(20): Xaa = Any Amino Acid
PGXTCGEICAXYAACTGXCX

SEQ ID NO: 1509 - protein, 19 aa, Artificial Sequence
  Synthetically generated peptide
  VARIANT (1)...(19): Xaa = Any Amino Acid
PGXTCGEICAXYAACTGCX

SEQ ID NO: 1510 - protein, 20 aa, Artificial Sequence
  Synthetically generated peptide
  VARIANT (1)...(20): Xaa = Any Amino Acid
PGXTCGEICAXYAACTGCXX

SEQ ID NO: 1511 - protein, 18 aa, Artificial Sequence
  Synthetically generated peptide
  VARIANT (1)...(18): Xaa = Any Amino Acid
PGXTCGEICAYXAACTGC

SEQ ID NO: 1512 - protein, 19 aa, Artificial Sequence
  Synthetically generated peptide
  VARIANT (1)...(19): Xaa = Any Amino Acid
PGXTCGEICAYXXAACTGC

SEQ ID NO: 1513 - protein, 20 aa, Artificial Sequence
  Synthetically generated peptide
  VARIANT (1)...(20): Xaa = Any Amino Acid
PGXTCGEICAYXXXAACTGC

SEQ ID NO: 1514 - protein, 20 aa, Artificial Sequence
  Synthetically generated peptide
  VARIANT (1)...(20): Xaa = Any Amino Acid
PGXTCGEICAYXXAXACTGC

SEQ ID NO: 1515 - protein, 20 aa, Artificial Sequence
  Synthetically generated peptide
  VARIANT (1)...(20): Xaa = Any Amino Acid
PGXTCGEICAYXXAAXCTGC

SEQ ID NO: 1516 - protein, 20 aa, Artificial Sequence
  Synthetically generated peptide
  VARIANT (1)...(20): Xaa = Any Amino Acid
PGXTCGEICAYXXAACXTGC

SEQ ID NO: 1517 - protein, 20 aa, Artificial Sequence
  Synthetically generated peptide
  VARIANT (1)...(20): Xaa = Any Amino Acid
PGXTCGEICAYXXAACTXGC

SEQ ID NO: 1518 - protein, 20 aa, Artificial Sequence
  Synthetically generated peptide
  VARIANT (1)...(20): Xaa = Any Amino Acid
PGXTCGEICAYXXAACTGXC

SEQ ID NO: 1519 - protein, 20 aa, Artificial Sequence
  Synthetically generated peptide
  VARIANT (1)...(20): Xaa = Any Amino Acid
PGXTCGEICAYXXAACTGCX

SEQ ID NO: 1520 - protein, 19 aa, Artificial Sequence
  Synthetically generated peptide
  VARIANT (1)...(19): Xaa = Any Amino Acid
PGXTCGEICAYXAXACTGC

SEQ ID NO: 1521 - protein, 20 aa, Artificial Sequence
  Synthetically generated peptide
  VARIANT (1)...(20): Xaa = Any Amino Acid
PGXTCGEICAYXAXXACTGC

SEQ ID NO: 1522 - protein, 20 aa, Artificial Sequence
  Synthetically generated peptide
  VARIANT (1)...(20): Xaa = Any Amino Acid
PGXTCGEICAYXAXAXCTGC

SEQ ID NO: 1523 - protein, 20 aa, Artificial Sequence
  Synthetically generated peptide
  VARIANT (1)...(20): Xaa = Any Amino Acid
PGXTCGEICAYXAXACXTGC

SEQ ID NO: 1524 - protein, 20 aa, Artificial Sequence
  Synthetically generated peptide
  VARIANT (1)...(20): Xaa = Any Amino Acid
PGXTCGEICAYXAXACTXGC

SEQ ID NO: 1525 - protein, 20 aa, Artificial Sequence
  Synthetically generated peptide
  VARIANT (1)...(20): Xaa = Any Amino Acid
PGXTCGEICAYXAXACTGXC

SEQ ID NO: 1526 - protein, 20 aa, Artificial Sequence
  Synthetically generated peptide
  VARIANT (1)...(20): Xaa = Any Amino Acid
PGXTCGEICAYXAXACTGCX

SEQ ID NO: 1527 - protein, 19 aa, Artificial Sequence
  Synthetically generated peptide
  VARIANT (1)...(19): Xaa = Any Amino Acid
PGXTCGEICAYXAAXCTGC

SEQ ID NO: 1528 - protein, 20 aa, Artificial Sequence
  Synthetically generated peptide
  VARIANT (1)...(20): Xaa = Any Amino Acid
PGXTCGEICAYXAAXXCTGC

SEQ ID NO: 1529 - protein, 20 aa, Artificial Sequence
  Synthetically generated peptide
  VARIANT (1)...(20): Xaa = Any Amino Acid
PGXTCGEICAYXAAXCXTGC

SEQ ID NO: 1530 - protein, 20 aa, Artificial Sequence
  Synthetically generated peptide
  VARIANT (1)...(20): Xaa = Any Amino Acid
PGXTCGEICAYXAAXCTXGC

SEQ ID NO: 1531 - protein, 20 aa, Artificial Sequence
  Synthetically generated peptide
  VARIANT (1)...(20): Xaa = Any Amino Acid
PGXTCGEICAYXAAXCTGXC

SEQ ID NO: 1532 - protein, 20 aa, Artificial Sequence
  Synthetically generated peptide
  VARIANT (1)...(20): Xaa = Any Amino Acid
PGXTCGEICAYXAAXCTGCX

SEQ ID NO: 1533 - protein, 19 aa, Artificial Sequence
  Synthetically generated peptide
  VARIANT (1)...(19): Xaa = Any Amino Acid
PGXTCGEICAYXAACXTGC

SEQ ID NO: 1534 - protein, 20 aa, Artificial Sequence
  Synthetically generated peptide
  VARIANT (1)...(20): Xaa = Any Amino Acid
PGXTCGEICAYXAACXXTGC

SEQ ID NO: 1535 - protein, 20 aa, Artificial Sequence
  Synthetically generated peptide
  VARIANT (1)...(20): Xaa = Any Amino Acid
PGXTCGEICAYXAACXTXGC

SEQ ID NO: 1536 - protein, 20 aa, Artificial Sequence
  Synthetically generated peptide
  VARIANT (1)...(20): Xaa = Any Amino Acid
PGXTCGEICAYXAACXTGXC

SEQ ID NO: 1537 - protein, 20 aa, Artificial Sequence
  Synthetically generated peptide
  VARIANT (1)...(20): Xaa = Any Amino Acid
PGXTCGEICAYXAACXTGCX

SEQ ID NO: 1538 - protein, 19 aa, Artificial Sequence
  Synthetically generated peptide
  VARIANT (1)...(19): Xaa = Any Amino Acid
PGXTCGEICAYXAACTXGC

SEQ ID NO: 1539 - protein, 20 aa, Artificial Sequence
  Synthetically generated peptide
  VARIANT (1)...(20): Xaa = Any Amino Acid
PGXTCGEICAYXAACTXXGC

SEQ ID NO: 1540 - protein, 20 aa, Artificial Sequence
  Synthetically generated peptide
  VARIANT (1)...(20): Xaa = Any Amino Acid
PGXTCGEICAYXAACTXGXC

SEQ ID NO: 1541 - protein, 20 aa, Artificial Sequence
  Synthetically generated peptide
  VARIANT (1)...(20): Xaa = Any Amino Acid
PGXTCGEICAYXAACTXGCX

SEQ ID NO: 1542 - protein, 19 aa, Artificial Sequence
  Synthetically generated peptide
  VARIANT (1)...(19): Xaa = Any Amino Acid
PGXTCGEICAYXAACTGXC

SEQ ID NO: 1543 - protein, 20 aa, Artificial Sequence
  Synthetically generated peptide
  VARIANT (1)...(20): Xaa = Any Amino Acid
PGXTCGEICAYXAACTGXXC

SEQ ID NO: 1544 - protein, 20 aa, Artificial Sequence
  Synthetically generated peptide
  VARIANT (1)...(20): Xaa = Any Amino Acid
PGXTCGEICAYXAACTGXCX

SEQ ID NO: 1545 - protein, 19 aa, Artificial Sequence
  Synthetically generated peptide
  VARIANT (1)...(19): Xaa = Any Amino Acid
PGXTCGEICAYXAACTGCX

SEQ ID NO: 1546 - protein, 20 aa, Artificial Sequence
  Synthetically generated peptide
  VARIANT (1)...(20): Xaa = Any Amino Acid
PGXTCGEICAYXAACTGCXX

SEQ ID NO: 1547 - protein, 18 aa, Artificial Sequence
  Synthetically generated peptide
  VARIANT (1)...(18): Xaa = Any Amino Acid
PGXTCGEICAYAXACTGC

SEQ ID NO: 1548 - protein, 19 aa, Artificial Sequence
  Synthetically generated peptide
  VARIANT (1)...(19): Xaa = Any Amino Acid
PGXTCGEICAYAXXACTGC

SEQ ID NO: 1549 - protein, 20 aa, Artificial Sequence
  Synthetically generated peptide
  VARIANT (1)...(20): Xaa = Any Amino Acid
PGXTCGEICAYAXXXACTGC

SEQ ID NO: 1550 - protein, 20 aa, Artificial Sequence
  Synthetically generated peptide
  VARIANT (1)...(20): Xaa = Any Amino Acid
PGXTCGEICAYAXXAXCTGC

SEQ ID NO: 1551 - protein, 20 aa, Artificial Sequence
  Synthetically generated peptide
  VARIANT (1)...(20): Xaa = Any Amino Acid
PGXTCGEICAYAXXACXTGC

SEQ ID NO: 1552 - protein, 20 aa, Artificial Sequence
  Synthetically generated peptide
  VARIANT (1)...(20): Xaa = Any Amino Acid
PGXTCGEICAYAXXACTXGC

SEQ ID NO: 1553 - protein, 20 aa, Artificial Sequence
  Synthetically generated peptide
  VARIANT (1)...(20): Xaa = Any Amino Acid
PGXTCGEICAYAXXACTGXC

SEQ ID NO: 1554 - protein, 20 aa, Artificial Sequence
  Synthetically generated peptide
  VARIANT (1)...(20): Xaa = Any Amino Acid
PGXTCGEICAYAXXACTGCX

SEQ ID NO: 1555 - protein, 19 aa, Artificial Sequence
  Synthetically generated peptide
  VARIANT (1)...(19): Xaa = Any Amino Acid
PGXTCGEICAYAXAXCTGC

SEQ ID NO: 1556 - protein, 20 aa, Artificial Sequence
  Synthetically generated peptide
  VARIANT (1)...(20): Xaa = Any Amino Acid
PGXTCGEICAYAXAXXCTGC

SEQ ID NO: 1557 - protein, 20 aa, Artificial Sequence
  Synthetically generated peptide
  VARIANT (1)...(20): Xaa = Any Amino Acid
PGXTCGEICAYAXAXCXTGC

SEQ ID NO: 1558 - protein, 20 aa, Artificial Sequence
  Synthetically generated peptide
  VARIANT (1)...(20): Xaa = Any Amino Acid
PGXTCGEICAYAXAXCTXGC

SEQ ID NO: 1559 - protein, 20 aa, Artificial Sequence
  Synthetically generated peptide
  VARIANT (1)...(20): Xaa = Any Amino Acid
PGXTCGEICAYAXAXCTGXC

SEQ ID NO: 1560 - protein, 20 aa, Artificial Sequence
  Synthetically generated peptide
  VARIANT (1)...(20): Xaa = Any Amino Acid
PGXTCGEICAYAXAXCTGCX

SEQ ID NO: 1561 - protein, 19 aa, Artificial Sequence
  Synthetically generated peptide
  VARIANT (1)...(19): Xaa = Any Amino Acid
PGXTCGEICAYAXACXTGC

SEQ ID NO: 1562 - protein, 20 aa, Artificial Sequence
  Synthetically generated peptide
  VARIANT (1)...(20): Xaa = Any Amino Acid
PGXTCGEICAYAXACXXTGC

SEQ ID NO: 1563 - protein, 20 aa, Artificial Sequence
  Synthetically generated peptide
  VARIANT (1)...(20): Xaa = Any Amino Acid
PGXTCGEICAYAXACXTXGC

SEQ ID NO: 1564 - protein, 20 aa, Artificial Sequence
  Synthetically generated peptide
  VARIANT (1)...(20): Xaa = Any Amino Acid
PGXTCGEICAYAXACXTGXC

SEQ ID NO: 1565 - protein, 20 aa, Artificial Sequence
  Synthetically generated peptide
  VARIANT (1)...(20): Xaa = Any Amino Acid
PGXTCGEICAYAXACXTGCX

SEQ ID NO: 1566 - protein, 19 aa, Artificial Sequence
  Synthetically generated peptide
  VARIANT (1)...(19): Xaa = Any Amino Acid
PGXTCGEICAYAXACTXGC

SEQ ID NO: 1567 - protein, 20 aa, Artificial Sequence
  Synthetically generated peptide
  VARIANT (1)...(20): Xaa = Any Amino Acid
PGXTCGEICAYAXACTXXGC

SEQ ID NO: 1568 - protein, 20 aa, Artificial Sequence
  Synthetically generated peptide
  VARIANT (1)...(20): Xaa = Any Amino Acid
PGXTCGEICAYAXACTXGXC

SEQ ID NO: 1569 - protein, 20 aa, Artificial Sequence
  Synthetically generated peptide
  VARIANT (1)...(20): Xaa = Any Amino Acid
PGXTCGEICAYAXACTXGCX

SEQ ID NO: 1570 - protein, 19 aa, Artificial Sequence
  Synthetically generated peptide
  VARIANT (1)...(19): Xaa = Any Amino Acid
PGXTCGEICAYAXACTGXC

SEQ ID NO: 1571 - protein, 20 aa, Artificial Sequence
  Synthetically generated peptide
  VARIANT (1)...(20): Xaa = Any Amino Acid
PGXTCGEICAYAXACTGXXC

SEQ ID NO: 1572 - protein, 20 aa, Artificial Sequence
  Synthetically generated peptide
  VARIANT (1)...(20): Xaa = Any Amino Acid
PGXTCGEICAYAXACTGXCX

SEQ ID NO: 1573 - protein, 19 aa, Artificial Sequence
  Synthetically generated peptide
  VARIANT (1)...(19): Xaa = Any Amino Acid
PGXTCGEICAYAXACTGCX

SEQ ID NO: 1574 - protein, 20 aa, Artificial Sequence
  Synthetically generated peptide
  VARIANT (1)...(20): Xaa = Any Amino Acid
PGXTCGEICAYAXACTGCXX

SEQ ID NO: 1575 - protein, 18 aa, Artificial Sequence
  Synthetically generated peptide
  VARIANT (1)...(18): Xaa = Any Amino Acid
PGXTCGEICAYAAXCTGC

SEQ ID NO: 1576 - protein, 19 aa, Artificial Sequence
  Synthetically generated peptide
  VARIANT (1)...(19): Xaa = Any Amino Acid
PGXTCGEICAYAAXXCTGC

SEQ ID NO: 1577 - protein, 20 aa, Artificial Sequence
  Synthetically generated peptide
  VARIANT (1)...(20): Xaa = Any Amino Acid
PGXTCGEICAYAAXXXCTGC

SEQ ID NO: 1578 - protein, 20 aa, Artificial Sequence
  Synthetically generated peptide
  VARIANT (1)...(20): Xaa = Any Amino Acid
PGXTCGEICAYAAXXCXTGC

SEQ ID NO: 1579 - protein, 20 aa, Artificial Sequence
  Synthetically generated peptide
  VARIANT (1)...(20): Xaa = Any Amino Acid
PGXTCGEICAYAAXXCTXGC

SEQ ID NO: 1580 - protein, 20 aa, Artificial Sequence
  Synthetically generated peptide
  VARIANT (1)...(20): Xaa = Any Amino Acid
PGXTCGEICAYAAXXCTGXC

SEQ ID NO: 1581 - protein, 20 aa, Artificial Sequence
  Synthetically generated peptide
  VARIANT (1)...(20): Xaa = Any Amino Acid
PGXTCGEICAYAAXXCTGCX

SEQ ID NO: 1582 - protein, 19 aa, Artificial Sequence
  Synthetically generated peptide
  VARIANT (1)...(19): Xaa = Any Amino Acid
PGXTCGEICAYAAXCXTGC

SEQ ID NO: 1583 - protein, 20 aa, Artificial Sequence
  Synthetically generated peptide
  VARIANT (1)...(20): Xaa = Any Amino Acid
PGXTCGEICAYAAXCXXTGC

SEQ ID NO: 1584 - protein, 20 aa, Artificial Sequence
  Synthetically generated peptide
  VARIANT (1)...(20): Xaa = Any Amino Acid
PGXTCGEICAYAAXCXTXGC

SEQ ID NO: 1585 - protein, 20 aa, Artificial Sequence
  Synthetically generated peptide
  VARIANT (1)...(20): Xaa = Any Amino Acid
PGXTCGEICAYAAXCXTGXC

SEQ ID NO: 1586 - protein, 20 aa, Artificial Sequence
  Synthetically generated peptide
  VARIANT (1)...(20): Xaa = Any Amino Acid
PGXTCGEICAYAAXCXTGCX

SEQ ID NO: 1587 - protein, 19 aa, Artificial Sequence
  Synthetically generated peptide
  VARIANT (1)...(19): Xaa = Any Amino Acid
PGXTCGEICAYAAXCTXGC

SEQ ID NO: 1588 - protein, 20 aa, Artificial Sequence
  Synthetically generated peptide
  VARIANT (1)...(20): Xaa = Any Amino Acid
PGXTCGEICAYAAXCTXXGC

SEQ ID NO: 1589 - protein, 20 aa, Artificial Sequence
  Synthetically generated peptide
  VARIANT (1)...(20): Xaa = Any Amino Acid
PGXTCGEICAYAAXCTXGXC

SEQ ID NO: 1590 - protein, 20 aa, Artificial Sequence
  Synthetically generated peptide
  VARIANT (1)...(20): Xaa = Any Amino Acid
PGXTCGEICAYAAXCTXGCX

SEQ ID NO: 1591 - protein, 19 aa, Artificial Sequence
  Synthetically generated peptide
  VARIANT (1)...(19): Xaa = Any Amino Acid
PGXTCGEICAYAAXCTGXC

SEQ ID NO: 1592 - protein, 20 aa, Artificial Sequence
  Synthetically generated peptide
  VARIANT (1)...(20): Xaa = Any Amino Acid
PGXTCGEICAYAAXCTGXXC

SEQ ID NO: 1593 - protein, 20 aa, Artificial Sequence
  Synthetically generated peptide
  VARIANT (1)...(20): Xaa = Any Amino Acid
PGXTCGEICAYAAXCTGXCX

SEQ ID NO: 1594 - protein, 19 aa, Artificial Sequence
  Synthetically generated peptide
  VARIANT (1)...(19): Xaa = Any Amino Acid
PGXTCGEICAYAAXCTGCX

SEQ ID NO: 1595 - protein, 20 aa, Artificial Sequence
  Synthetically generated peptide
  VARIANT (1)...(20): Xaa = Any Amino Acid
PGXTCGEICAYAAXCTGCXX

SEQ ID NO: 1596 - protein, 18 aa, Artificial Sequence
  Synthetically generated peptide
  VARIANT (1)...(18): Xaa = Any Amino Acid
PGXTCGEICAYAACXTGC

SEQ ID NO: 1597 - protein, 19 aa, Artificial Sequence
  Synthetically generated peptide
  VARIANT (1)...(19): Xaa = Any Amino Acid
PGXTCGEICAYAACXXTGC

SEQ ID NO: 1598 - protein, 20 aa, Artificial Sequence
  Synthetically generated peptide
  VARIANT (1)...(20): Xaa = Any Amino Acid
PGXTCGEICAYAACXXXTGC

SEQ ID NO: 1599 - protein, 20 aa, Artificial Sequence
  Synthetically generated peptide
  VARIANT (1)...(20): Xaa = Any Amino Acid
PGXTCGEICAYAACXXTXGC

SEQ ID NO: 1600 - protein, 20 aa, Artificial Sequence
  Synthetically generated peptide
  VARIANT (1)...(20): Xaa = Any Amino Acid
PGXTCGEICAYAACXXTGXC

SEQ ID NO: 1601 - protein, 20 aa, Artificial Sequence
  Synthetically generated peptide
  VARIANT (1)...(20): Xaa = Any Amino Acid
PGXTCGEICAYAACXXTGCX

SEQ ID NO: 1602 - protein, 19 aa, Artificial Sequence
  Synthetically generated peptide
  VARIANT (1)...(19): Xaa = Any Amino Acid
PGXTCGEICAYAACXTXGC

SEQ ID NO: 1603 - protein, 20 aa, Artificial Sequence
  Synthetically generated peptide
  VARIANT (1)...(20): Xaa = Any Amino Acid
PGXTCGEICAYAACXTXXGC

SEQ ID NO: 1604 - protein, 20 aa, Artificial Sequence
  Synthetically generated peptide
  VARIANT (1)...(20): Xaa = Any Amino Acid
PGXTCGEICAYAACXTXGXC

SEQ ID NO: 1605 - protein, 20 aa, Artificial Sequence
  Synthetically generated peptide
  VARIANT (1)...(20): Xaa = Any Amino Acid
PGXTCGEICAYAACXTXGCX

SEQ ID NO: 1606 - protein, 19 aa, Artificial Sequence
  Synthetically generated peptide
  VARIANT (1)...(19): Xaa = Any Amino Acid
PGXTCGEICAYAACXTGXC

SEQ ID NO: 1607 - protein, 20 aa, Artificial Sequence
  Synthetically generated peptide
  VARIANT (1)...(20): Xaa = Any Amino Acid
PGXTCGEICAYAACXTGXXC

SEQ ID NO: 1608 - protein, 20 aa, Artificial Sequence
  Synthetically generated peptide
  VARIANT (1)...(20): Xaa = Any Amino Acid
PGXTCGEICAYAACXTGXCX

SEQ ID NO: 1609 - protein, 19 aa, Artificial Sequence
  Synthetically generated peptide
  VARIANT (1)...(19): Xaa = Any Amino Acid
PGXTCGEICAYAACXTGCX

SEQ ID NO: 1610 - protein, 20 aa, Artificial Sequence
  Synthetically generated peptide
  VARIANT (1)...(20): Xaa = Any Amino Acid
PGXTCGEICAYAACXTGCXX

SEQ ID NO: 1611 - protein, 18 aa, Artificial Sequence
  Synthetically generated peptide
  VARIANT (1)...(18): Xaa = Any Amino Acid
PGXTCGEICAYAACTXGC

SEQ ID NO: 1612 - protein, 19 aa, Artificial Sequence
  Synthetically generated peptide
  VARIANT (1)...(19): Xaa = Any Amino Acid
PGXTCGEICAYAACTXXGC

SEQ ID NO: 1613 - protein, 20 aa, Artificial Sequence
  Synthetically generated peptide
  VARIANT (1)...(20): Xaa = Any Amino Acid
PGXTCGEICAYAACTXXXGC

SEQ ID NO: 1614 - protein, 20 aa, Artificial Sequence
  Synthetically generated peptide
  VARIANT (1)...(20): Xaa = Any Amino Acid
PGXTCGEICAYAACTXXGXC

SEQ ID NO: 1615 - protein, 20 aa, Artificial Sequence
  Synthetically generated peptide
  VARIANT (1)...(20): Xaa = Any Amino Acid
PGXTCGEICAYAACTXXGCX

SEQ ID NO: 1616 - protein, 19 aa, Artificial Sequence
  Synthetically generated peptide
  VARIANT (1)...(19): Xaa = Any Amino Acid
PGXTCGEICAYAACTXGXC

SEQ ID NO: 1617 - protein, 20 aa, Artificial Sequence
  Synthetically generated peptide
  VARIANT (1)...(20): Xaa = Any Amino Acid
PGXTCGEICAYAACTXGXXC

SEQ ID NO: 1618 - protein, 20 aa, Artificial Sequence
  Synthetically generated peptide
  VARIANT (1)...(20): Xaa = Any Amino Acid
PGXTCGEICAYAACTXGXCX

SEQ ID NO: 1619 - protein, 19 aa, Artificial Sequence
  Synthetically generated peptide
  VARIANT (1)...(19): Xaa = Any Amino Acid
PGXTCGEICAYAACTXGCX

SEQ ID NO: 1620 - protein, 20 aa, Artificial Sequence
  Synthetically generated peptide
  VARIANT (1)...(20): Xaa = Any Amino Acid
PGXTCGEICAYAACTXGCXX

SEQ ID NO: 1621 - protein, 18 aa, Artificial Sequence
  Synthetically generated peptide
  VARIANT (1)...(18): Xaa = Any Amino Acid
PGXTCGEICAYAACTGXC

SEQ ID NO: 1622 - protein, 19 aa, Artificial Sequence
  Synthetically generated peptide
  VARIANT (1)...(19): Xaa = Any Amino Acid
PGXTCGEICAYAACTGXXC

SEQ ID NO: 1623 - protein, 20 aa, Artificial Sequence
  Synthetically generated peptide
  VARIANT (1)...(20): Xaa = Any Amino Acid
PGXTCGEICAYAACTGXXXC

SEQ ID NO: 1624 - protein, 20 aa, Artificial Sequence
  Synthetically generated peptide
  VARIANT (1)...(20): Xaa = Any Amino Acid
PGXTCGEICAYAACTGXXCX

SEQ ID NO: 1625 - protein, 19 aa, Artificial Sequence
  Synthetically generated peptide
  VARIANT (1)...(19): Xaa = Any Amino Acid
PGXTCGEICAYAACTGXCX

SEQ ID NO: 1626 - protein, 20 aa, Artificial Sequence
  Synthetically generated peptide
  VARIANT (1)...(20): Xaa = Any Amino Acid
PGXTCGEICAYAACTGXCXX

SEQ ID NO: 1627 - protein, 18 aa, Artificial Sequence
  Synthetically generated peptide
  VARIANT (1)...(18): Xaa = Any Amino Acid
PGXTCGEICAYAACTGCX

SEQ ID NO: 1628 - protein, 19 aa, Artificial Sequence
  Synthetically generated peptide
  VARIANT (1)...(19): Xaa = Any Amino Acid
PGXTCGEICAYAACTGCXX

SEQ ID NO: 1629 - protein, 20 aa, Artificial Sequence
  Synthetically generated peptide
  VARIANT (1)...(20): Xaa = Any Amino Acid
PGXTCGEICAYAACTGCXXX

SEQ ID NO: 1630 - protein, 17 aa, Artificial Sequence
  Synthetically generated peptide
  VARIANT (1)...(17): Xaa = Any Amino Acid
PGTXCGEICAYAACTGC

SEQ ID NO: 1631 - protein, 18 aa, Artificial Sequence
  Synthetically generated peptide
  VARIANT (1)...(18): Xaa = Any Amino Acid
PGTXXCGEICAYAACTGC

SEQ ID NO: 1632 - protein, 19 aa, Artificial Sequence
  Synthetically generated peptide
  VARIANT (1)...(19): Xaa = Any Amino Acid
PGTXXXCGEICAYAACTGC

SEQ ID NO: 1633 - protein, 20 aa, Artificial Sequence
  Synthetically generated peptide
  VARIANT (1)...(20): Xaa = Any Amino Acid
PGTXXXXCGEICAYAACTGC

SEQ ID NO: 1634 - protein, 20 aa, Artificial Sequence
  Synthetically generated peptide
  VARIANT (1)...(20): Xaa = Any Amino Acid
PGTXXXCXGEICAYAACTGC

SEQ ID NO: 1635 - protein, 20 aa, Artificial Sequence
  Synthetically generated peptide
  VARIANT (1)...(20): Xaa = Any Amino Acid
PGTXXXCGXEICAYAACTGC

SEQ ID NO: 1636 - protein, 20 aa, Artificial Sequence
  Synthetically generated peptide
  VARIANT (1)...(20): Xaa = Any Amino Acid
PGTXXXCGEXICAYAACTGC

SEQ ID NO: 1637 - protein, 20 aa, Artificial Sequence
  Synthetically generated peptide
  VARIANT (1)...(20): Xaa = Any Amino Acid
PGTXXXCGEIXCAYAACTGC

SEQ ID NO: 1638 - protein, 20 aa, Artificial Sequence
  Synthetically generated peptide
  VARIANT (1)...(20): Xaa = Any Amino Acid
PGTXXXCGEICXAYAACTGC

SEQ ID NO: 1639 - protein, 20 aa, Artificial Sequence
  Synthetically generated peptide
  VARIANT (1)...(20): Xaa = Any Amino Acid
PGTXXXCGEICAXYAACTGC

SEQ ID NO: 1640 - protein, 20 aa, Artificial Sequence
  Synthetically generated peptide
  VARIANT (1)...(20): Xaa = Any Amino Acid
PGTXXXCGEICAYXAACTGC

SEQ ID NO: 1641 - protein, 20 aa, Artificial Sequence
  Synthetically generated peptide
  VARIANT (1)...(20): Xaa = Any Amino Acid
PGTXXXCGEICAYAXACTGC

SEQ ID NO: 1642 - protein, 20 aa, Artificial Sequence
  Synthetically generated peptide
  VARIANT (1)...(20): Xaa = Any Amino Acid
PGTXXXCGEICAYAAXCTGC

SEQ ID NO: 1643 - protein, 20 aa, Artificial Sequence
  Synthetically generated peptide
  VARIANT (1)...(20): Xaa = Any Amino Acid
PGTXXXCGEICAYAACXTGC

SEQ ID NO: 1644 - protein, 20 aa, Artificial Sequence
  Synthetically generated peptide
  VARIANT (1)...(20): Xaa = Any Amino Acid
PGTXXXCGEICAYAACTXGC

SEQ ID NO: 1645 - protein, 20 aa, Artificial Sequence
  Synthetically generated peptide
  VARIANT (1)...(20): Xaa = Any Amino Acid
PGTXXXCGEICAYAACTGXC

SEQ ID NO: 1646 - protein, 20 aa, Artificial Sequence
  Synthetically generated peptide
  VARIANT (1)...(20): Xaa = Any Amino Acid
PGTXXXCGEICAYAACTGCX

SEQ ID NO: 1647 - protein, 19 aa, Artificial Sequence
  Synthetically generated peptide
  VARIANT (1)...(19): Xaa = Any Amino Acid
PGTXXCXGEICAYAACTGC

SEQ ID NO: 1648 - protein, 20 aa, Artificial Sequence
  Synthetically generated peptide
  VARIANT (1)...(20): Xaa = Any Amino Acid
PGTXXCXXGEICAYAACTGC

SEQ ID NO: 1649 - protein, 20 aa, Artificial Sequence
  Synthetically generated peptide
  VARIANT (1)...(20): Xaa = Any Amino Acid
PGTXXCXGXEICAYAACTGC

SEQ ID NO: 1650 - protein, 20 aa, Artificial Sequence
  Synthetically generated peptide
  VARIANT (1)...(20): Xaa = Any Amino Acid
PGTXXCXGEXICAYAACTGC

SEQ ID NO: 1651 - protein, 20 aa, Artificial Sequence
  Synthetically generated peptide
  VARIANT (1)...(20): Xaa = Any Amino Acid
PGTXXCXGEIXCAYAACTGC

SEQ ID NO: 1652 - protein, 20 aa, Artificial Sequence
  Synthetically generated peptide
  VARIANT (1)...(20): Xaa = Any Amino Acid
PGTXXCXGEICXAYAACTGC

SEQ ID NO: 1653 - protein, 20 aa, Artificial Sequence
  Synthetically generated peptide
  VARIANT (1)...(20): Xaa = Any Amino Acid
PGTXXCXGEICAXYAACTGC

SEQ ID NO: 1654 - protein, 20 aa, Artificial Sequence
  Synthetically generated peptide
  VARIANT (1)...(20): Xaa = Any Amino Acid
PGTXXCXGEICAYXAACTGC

SEQ ID NO: 1655 - protein, 20 aa, Artificial Sequence
  Synthetically generated peptide
  VARIANT (1)...(20): Xaa = Any Amino Acid
PGTXXCXGEICAYAXACTGC

SEQ ID NO: 1656 - protein, 20 aa, Artificial Sequence
  Synthetically generated peptide
  VARIANT (1)...(20): Xaa = Any Amino Acid
PGTXXCXGEICAYAAXCTGC

SEQ ID NO: 1657 - protein, 20 aa, Artificial Sequence
  Synthetically generated peptide
  VARIANT (1)...(20): Xaa = Any Amino Acid
PGTXXCXGEICAYAACXTGC

SEQ ID NO: 1658 - protein, 20 aa, Artificial Sequence
  Synthetically generated peptide
  VARIANT (1)...(20): Xaa = Any Amino Acid
PGTXXCXGEICAYAACTXGC

SEQ ID NO: 1659 - protein, 20 aa, Artificial Sequence
  Synthetically generated peptide
  VARIANT (1)...(20): Xaa = Any Amino Acid
PGTXXCXGEICAYAACTGXC

SEQ ID NO: 1660 - protein, 20 aa, Artificial Sequence
  Synthetically generated peptide
  VARIANT (1)...(20): Xaa = Any Amino Acid
PGTXXCXGEICAYAACTGCX

SEQ ID NO: 1661 - protein, 19 aa, Artificial Sequence
  Synthetically generated peptide
  VARIANT (1)...(19): Xaa = Any Amino Acid
PGTXXCGXEICAYAACTGC

SEQ ID NO: 1662 - protein, 20 aa, Artificial Sequence
  Synthetically generated peptide
  VARIANT (1)...(20): Xaa = Any Amino Acid
PGTXXCGXXEICAYAACTGC

SEQ ID NO: 1663 - protein, 20 aa, Artificial Sequence
  Synthetically generated peptide
  VARIANT (1)...(20): Xaa = Any Amino Acid
PGTXXCGXEXICAYAACTGC

SEQ ID NO: 1664 - protein, 20 aa, Artificial Sequence
  Synthetically generated peptide
  VARIANT (1)...(20): Xaa = Any Amino Acid
PGTXXCGXEIXCAYAACTGC

SEQ ID NO: 1665 - protein, 20 aa, Artificial Sequence
  Synthetically generated peptide
  VARIANT (1)...(20): Xaa = Any Amino Acid
PGTXXCGXEICXAYAACTGC

SEQ ID NO: 1666 - protein, 20 aa, Artificial Sequence
  Synthetically generated peptide
  VARIANT (1)...(20): Xaa = Any Amino Acid
PGTXXCGXEICAXYAACTGC

SEQ ID NO: 1667 - protein, 20 aa, Artificial Sequence
  Synthetically generated peptide
  VARIANT (1)...(20): Xaa = Any Amino Acid
PGTXXCGXEICAYXAACTGC

SEQ ID NO: 1668 - protein, 20 aa, Artificial Sequence
  Synthetically generated peptide
  VARIANT (1)...(20): Xaa = Any Amino Acid
PGTXXCGXEICAYAXACTGC

SEQ ID NO: 1669 - protein, 20 aa, Artificial Sequence
  Synthetically generated peptide
  VARIANT (1)...(20): Xaa = Any Amino Acid
PGTXXCGXEICAYAAXCTGC

SEQ ID NO: 1670 - protein, 20 aa, Artificial Sequence
  Synthetically generated peptide
  VARIANT (1)...(20): Xaa = Any Amino Acid
PGTXXCGXEICAYAACXTGC

SEQ ID NO: 1671 - protein, 20 aa, Artificial Sequence
  Synthetically generated peptide
  VARIANT (1)...(20): Xaa = Any Amino Acid
PGTXXCGXEICAYAACTXGC

SEQ ID NO: 1672 - protein, 20 aa, Artificial Sequence
  Synthetically generated peptide
  VARIANT (1)...(20): Xaa = Any Amino Acid
PGTXXCGXEICAYAACTGXC

SEQ ID NO: 1673 - protein, 20 aa, Artificial Sequence
  Synthetically generated peptide
  VARIANT (1)...(20): Xaa = Any Amino Acid
PGTXXCGXEICAYAACTGCX

SEQ ID NO: 1674 - protein, 19 aa, Artificial Sequence
  Synthetically generated peptide
  VARIANT (1)...(19): Xaa = Any Amino Acid
PGTXXCGEXICAYAACTGC

SEQ ID NO: 1675 - protein, 20 aa, Artificial Sequence
  Synthetically generated peptide
  VARIANT (1)...(20): Xaa = Any Amino Acid
PGTXXCGEXXICAYAACTGC

SEQ ID NO: 1676 - protein, 20 aa, Artificial Sequence
  Synthetically generated peptide
  VARIANT (1)...(20): Xaa = Any Amino Acid
PGTXXCGEXIXCAYAACTGC

SEQ ID NO: 1677 - protein, 20 aa, Artificial Sequence
  Synthetically generated peptide
  VARIANT (1)...(20): Xaa = Any Amino Acid
PGTXXCGEXICXAYAACTGC

SEQ ID NO: 1678 - protein, 20 aa, Artificial Sequence
  Synthetically generated peptide
  VARIANT (1)...(20): Xaa = Any Amino Acid
PGTXXCGEXICAXYAACTGC

SEQ ID NO: 1679 - protein, 20 aa, Artificial Sequence
  Synthetically generated peptide
  VARIANT (1)...(20): Xaa = Any Amino Acid
PGTXXCGEXICAYXAACTGC

SEQ ID NO: 1680 - protein, 20 aa, Artificial Sequence
  Synthetically generated peptide
  VARIANT (1)...(20): Xaa = Any Amino Acid
PGTXXCGEXICAYAXACTGC

SEQ ID NO: 1681 - protein, 20 aa, Artificial Sequence
  Synthetically generated peptide
  VARIANT (1)...(20): Xaa = Any Amino Acid
PGTXXCGEXICAYAAXCTGC

SEQ ID NO: 1682 - protein, 20 aa, Artificial Sequence
  Synthetically generated peptide
  VARIANT (1)...(20): Xaa = Any Amino Acid
PGTXXCGEXICAYAACXTGC

SEQ ID NO: 1683 - protein, 20 aa, Artificial Sequence
  Synthetically generated peptide
  VARIANT (1)...(20): Xaa = Any Amino Acid
PGTXXCGEXICAYAACTXGC

SEQ ID NO: 1684 - protein, 20 aa, Artificial Sequence
  Synthetically generated peptide
  VARIANT (1)...(20): Xaa = Any Amino Acid
PGTXXCGEXICAYAACTGXC

SEQ ID NO: 1685 - protein, 20 aa, Artificial Sequence
  Synthetically generated peptide
  VARIANT (1)...(20): Xaa = Any Amino Acid
PGTXXCGEXICAYAACTGCX

SEQ ID NO: 1686 - protein, 19 aa, Artificial Sequence
  Synthetically generated peptide
  VARIANT (1)...(19): Xaa = Any Amino Acid
PGTXXCGEIXCAYAACTGC

SEQ ID NO: 1687 - protein, 20 aa, Artificial Sequence
  Synthetically generated peptide
  VARIANT (1)...(20): Xaa = Any Amino Acid
PGTXXCGEIXXCAYAACTGC

SEQ ID NO: 1688 - protein, 20 aa, Artificial Sequence
  Synthetically generated peptide
  VARIANT (1)...(20): Xaa = Any Amino Acid
PGTXXCGEIXCXAYAACTGC

SEQ ID NO: 1689 - protein, 20 aa, Artificial Sequence
  Synthetically generated peptide
  VARIANT (1)...(20): Xaa = Any Amino Acid
PGTXXCGEIXCAXYAACTGC

SEQ ID NO: 1690 - protein, 20 aa, Artificial Sequence
  Synthetically generated peptide
  VARIANT (1)...(20): Xaa = Any Amino Acid
PGTXXCGEIXCAYXAACTGC

SEQ ID NO: 1691 - protein, 20 aa, Artificial Sequence
  Synthetically generated peptide
  VARIANT (1)...(20): Xaa = Any Amino Acid
PGTXXCGEIXCAYAXACTGC

SEQ ID NO: 1692 - protein, 20 aa, Artificial Sequence
  Synthetically generated peptide
  VARIANT (1)...(20): Xaa = Any Amino Acid
PGTXXCGEIXCAYAAXCTGC

SEQ ID NO: 1693 - protein, 20 aa, Artificial Sequence
  Synthetically generated peptide
  VARIANT (1)...(20): Xaa = Any Amino Acid
PGTXXCGEIXCAYAACXTGC

SEQ ID NO: 1694 - protein, 20 aa, Artificial Sequence
  Synthetically generated peptide
  VARIANT (1)...(20): Xaa = Any Amino Acid
PGTXXCGEIXCAYAACTXGC

SEQ ID NO: 1695 - protein, 20 aa, Artificial Sequence
  Synthetically generated peptide
  VARIANT (1)...(20): Xaa = Any Amino Acid
PGTXXCGEIXCAYAACTGXC

SEQ ID NO: 1696 - protein, 20 aa, Artificial Sequence
  Synthetically generated peptide
  VARIANT (1)...(20): Xaa = Any Amino Acid
PGTXXCGEIXCAYAACTGCX

SEQ ID NO: 1697 - protein, 19 aa, Artificial Sequence
  Synthetically generated peptide
  VARIANT (1)...(19): Xaa = Any Amino Acid
PGTXXCGEICXAYAACTGC

SEQ ID NO: 1698 - protein, 20 aa, Artificial Sequence
  Synthetically generated peptide
  VARIANT (1)...(20): Xaa = Any Amino Acid
PGTXXCGEICXXAYAACTGC

SEQ ID NO: 1699 - protein, 20 aa, Artificial Sequence
  Synthetically generated peptide
  VARIANT (1)...(20): Xaa = Any Amino Acid
PGTXXCGEICXAXYAACTGC

SEQ ID NO: 1700 - protein, 20 aa, Artificial Sequence
  Synthetically generated peptide
  VARIANT (1)...(20): Xaa = Any Amino Acid
PGTXXCGEICXAYXAACTGC

SEQ ID NO: 1701 - protein, 20 aa, Artificial Sequence
  Synthetically generated peptide
  VARIANT (1)...(20): Xaa = Any Amino Acid
PGTXXCGEICXAYAXACTGC

SEQ ID NO: 1702 - protein, 20 aa, Artificial Sequence
  Synthetically generated peptide
  VARIANT (1)...(20): Xaa = Any Amino Acid
PGTXXCGEICXAYAAXCTGC

SEQ ID NO: 1703 - protein, 20 aa, Artificial Sequence
  Synthetically generated peptide
  VARIANT (1)...(20): Xaa = Any Amino Acid
PGTXXCGEICXAYAACXTGC

SEQ ID NO: 1704 - protein, 20 aa, Artificial Sequence
  Synthetically generated peptide
  VARIANT (1)...(20): Xaa = Any Amino Acid
PGTXXCGEICXAYAACTXGC

SEQ ID NO: 1705 - protein, 20 aa, Artificial Sequence
  Synthetically generated peptide
  VARIANT (1)...(20): Xaa = Any Amino Acid
PGTXXCGEICXAYAACTGXC

SEQ ID NO: 1706 - protein, 20 aa, Artificial Sequence
  Synthetically generated peptide
  VARIANT (1)...(20): Xaa = Any Amino Acid
PGTXXCGEICXAYAACTGCX

SEQ ID NO: 1707 - protein, 19 aa, Artificial Sequence
  Synthetically generated peptide
  VARIANT (1)...(19): Xaa = Any Amino Acid
PGTXXCGEICAXYAACTGC

SEQ ID NO: 1708 - protein, 20 aa, Artificial Sequence
  Synthetically generated peptide
  VARIANT (1)...(20): Xaa = Any Amino Acid
PGTXXCGEICAXXYAACTGC

SEQ ID NO: 1709 - protein, 20 aa, Artificial Sequence
  Synthetically generated peptide
  VARIANT (1)...(20): Xaa = Any Amino Acid
PGTXXCGEICAXYXAACTGC

SEQ ID NO: 1710 - protein, 20 aa, Artificial Sequence
  Synthetically generated peptide
  VARIANT (1)...(20): Xaa = Any Amino Acid
PGTXXCGEICAXYAXACTGC

SEQ ID NO: 1711 - protein, 20 aa, Artificial Sequence
  Synthetically generated peptide
  VARIANT (1)...(20): Xaa = Any Amino Acid
PGTXXCGEICAXYAAXCTGC

SEQ ID NO: 1712 - protein, 20 aa, Artificial Sequence
  Synthetically generated peptide
  VARIANT (1)...(20): Xaa = Any Amino Acid
PGTXXCGEICAXYAACXTGC

SEQ ID NO: 1713 - protein, 20 aa, Artificial Sequence
  Synthetically generated peptide
  VARIANT (1)...(20): Xaa = Any Amino Acid
PGTXXCGEICAXYAACTXGC

SEQ ID NO: 1714 - protein, 20 aa, Artificial Sequence
  Synthetically generated peptide
  VARIANT (1)...(20): Xaa = Any Amino Acid
PGTXXCGEICAXYAACTGXC

SEQ ID NO: 1715 - protein, 20 aa, Artificial Sequence
  Synthetically generated peptide
  VARIANT (1)...(20): Xaa = Any Amino Acid
PGTXXCGEICAXYAACTGCX

SEQ ID NO: 1716 - protein, 19 aa, Artificial Sequence
  Synthetically generated peptide
  VARIANT (1)...(19): Xaa = Any Amino Acid
PGTXXCGEICAYXAACTGC

SEQ ID NO: 1717 - protein, 20 aa, Artificial Sequence
  Synthetically generated peptide
  VARIANT (1)...(20): Xaa = Any Amino Acid
PGTXXCGEICAYXXAACTGC

SEQ ID NO: 1718 - protein, 20 aa, Artificial Sequence
  Synthetically generated peptide
  VARIANT (1)...(20): Xaa = Any Amino Acid
PGTXXCGEICAYXAXACTGC

SEQ ID NO: 1719 - protein, 20 aa, Artificial Sequence
  Synthetically generated peptide
  VARIANT (1)...(20): Xaa = Any Amino Acid
PGTXXCGEICAYXAAXCTGC

SEQ ID NO: 1720 - protein, 20 aa, Artificial Sequence
  Synthetically generated peptide
  VARIANT (1)...(20): Xaa = Any Amino Acid
PGTXXCGEICAYXAACXTGC

SEQ ID NO: 1721 - protein, 20 aa, Artificial Sequence
  Synthetically generated peptide
  VARIANT (1)...(20): Xaa = Any Amino Acid
PGTXXCGEICAYXAACTXGC

SEQ ID NO: 1722 - protein, 20 aa, Artificial Sequence
  Synthetically generated peptide
  VARIANT (1)...(20): Xaa = Any Amino Acid
PGTXXCGEICAYXAACTGXC

SEQ ID NO: 1723 - protein, 20 aa, Artificial Sequence
  Synthetically generated peptide
  VARIANT (1)...(20): Xaa = Any Amino Acid
PGTXXCGEICAYXAACTGCX

SEQ ID NO: 1724 - protein, 19 aa, Artificial Sequence
  Synthetically generated peptide
  VARIANT (1)...(19): Xaa = Any Amino Acid
PGTXXCGEICAYAXACTGC

SEQ ID NO: 1725 - protein, 20 aa, Artificial Sequence
  Synthetically generated peptide
  VARIANT (1)...(20): Xaa = Any Amino Acid
PGTXXCGEICAYAXXACTGC

SEQ ID NO: 1726 - protein, 20 aa, Artificial Sequence
  Synthetically generated peptide
  VARIANT (1)...(20): Xaa = Any Amino Acid
PGTXXCGEICAYAXAXCTGC

SEQ ID NO: 1727 - protein, 20 aa, Artificial Sequence
  Synthetically generated peptide
  VARIANT (1)...(20): Xaa = Any Amino Acid
PGTXXCGEICAYAXACXTGC

SEQ ID NO: 1728 - protein, 20 aa, Artificial Sequence
  Synthetically generated peptide
  VARIANT (1)...(20): Xaa = Any Amino Acid
PGTXXCGEICAYAXACTXGC

SEQ ID NO: 1729 - protein, 20 aa, Artificial Sequence
  Synthetically generated peptide
  VARIANT (1)...(20): Xaa = Any Amino Acid
PGTXXCGEICAYAXACTGXC

SEQ ID NO: 1730 - protein, 20 aa, Artificial Sequence
  Synthetically generated peptide
  VARIANT (1)...(20): Xaa = Any Amino Acid
PGTXXCGEICAYAXACTGCX

SEQ ID NO: 1731 - protein, 19 aa, Artificial Sequence
  Synthetically generated peptide
  VARIANT (1)...(19): Xaa = Any Amino Acid
PGTXXCGEICAYAAXCTGC

SEQ ID NO: 1732 - protein, 20 aa, Artificial Sequence
  Synthetically generated peptide
  VARIANT (1)...(20): Xaa = Any Amino Acid
PGTXXCGEICAYAAXXCTGC

SEQ ID NO: 1733 - protein, 20 aa, Artificial Sequence
  Synthetically generated peptide
  VARIANT (1)...(20): Xaa = Any Amino Acid
PGTXXCGEICAYAAXCXTGC

SEQ ID NO: 1734 - protein, 20 aa, Artificial Sequence
  Synthetically generated peptide
  VARIANT (1)...(20): Xaa = Any Amino Acid
PGTXXCGEICAYAAXCTXGC

SEQ ID NO: 1735 - protein, 20 aa, Artificial Sequence
  Synthetically generated peptide
  VARIANT (1)...(20): Xaa = Any Amino Acid
PGTXXCGEICAYAAXCTGXC

SEQ ID NO: 1736 - protein, 20 aa, Artificial Sequence
  Synthetically generated peptide
  VARIANT (1)...(20): Xaa = Any Amino Acid
PGTXXCGEICAYAAXCTGCX

SEQ ID NO: 1737 - protein, 19 aa, Artificial Sequence
  Synthetically generated peptide
  VARIANT (1)...(19): Xaa = Any Amino Acid
PGTXXCGEICAYAACXTGC

SEQ ID NO: 1738 - protein, 20 aa, Artificial Sequence
  Synthetically generated peptide
  VARIANT (1)...(20): Xaa = Any Amino Acid
PGTXXCGEICAYAACXXTGC

SEQ ID NO: 1739 - protein, 20 aa, Artificial Sequence
  Synthetically generated peptide
  VARIANT (1)...(20): Xaa = Any Amino Acid
PGTXXCGEICAYAACXTXGC

SEQ ID NO: 1740 - protein, 20 aa, Artificial Sequence
  Synthetically generated peptide
  VARIANT (1)...(20): Xaa = Any Amino Acid
PGTXXCGEICAYAACXTGXC

SEQ ID NO: 1741 - protein, 20 aa, Artificial Sequence
  Synthetically generated peptide
  VARIANT (1)...(20): Xaa = Any Amino Acid
PGTXXCGEICAYAACXTGCX

SEQ ID NO: 1742 - protein, 19 aa, Artificial Sequence
  Synthetically generated peptide
  VARIANT (1)...(19): Xaa = Any Amino Acid
PGTXXCGEICAYAACTXGC

SEQ ID NO: 1743 - protein, 20 aa, Artificial Sequence
  Synthetically generated peptide
  VARIANT (1)...(20): Xaa = Any Amino Acid
PGTXXCGEICAYAACTXXGC

SEQ ID NO: 1744 - protein, 20 aa, Artificial Sequence
  Synthetically generated peptide
  VARIANT (1)...(20): Xaa = Any Amino Acid
PGTXXCGEICAYAACTXGXC

SEQ ID NO: 1745 - protein, 20 aa, Artificial Sequence
  Synthetically generated peptide
  VARIANT (1)...(20): Xaa = Any Amino Acid
PGTXXCGEICAYAACTXGCX

SEQ ID NO: 1746 - protein, 19 aa, Artificial Sequence
  Synthetically generated peptide
  VARIANT (1)...(19): Xaa = Any Amino Acid
PGTXXCGEICAYAACTGXC

SEQ ID NO: 1747 - protein, 20 aa, Artificial Sequence
  Synthetically generated peptide
  VARIANT (1)...(20): Xaa = Any Amino Acid
PGTXXCGEICAYAACTGXXC

SEQ ID NO: 1748 - protein, 20 aa, Artificial Sequence
  Synthetically generated peptide
  VARIANT (1)...(20): Xaa = Any Amino Acid
PGTXXCGEICAYAACTGXCX

SEQ ID NO: 1749 - protein, 19 aa, Artificial Sequence
  Synthetically generated peptide
  VARIANT (1)...(19): Xaa = Any Amino Acid
PGTXXCGEICAYAACTGCX

SEQ ID NO: 1750 - protein, 20 aa, Artificial Sequence
  Synthetically generated peptide
  VARIANT (1)...(20): Xaa = Any Amino Acid
PGTXXCGEICAYAACTGCXX

SEQ ID NO: 1751 - protein, 18 aa, Artificial Sequence
  Synthetically generated peptide
  VARIANT (1)...(18): Xaa = Any Amino Acid
PGTXCXGEICAYAACTGC

SEQ ID NO: 1752 - protein, 19 aa, Artificial Sequence
  Synthetically generated peptide
  VARIANT (1)...(19): Xaa = Any Amino Acid
PGTXCXXGEICAYAACTGC

SEQ ID NO: 1753 - protein, 20 aa, Artificial Sequence
  Synthetically generated peptide
  VARIANT (1)...(20): Xaa = Any Amino Acid
PGTXCXXXGEICAYAACTGC

SEQ ID NO: 1754 - protein, 20 aa, Artificial Sequence
  Synthetically generated peptide
  VARIANT (1)...(20): Xaa = Any Amino Acid
PGTXCXXGXEICAYAACTGC

SEQ ID NO: 1755 - protein, 20 aa, Artificial Sequence
  Synthetically generated peptide
  VARIANT (1)...(20): Xaa = Any Amino Acid
PGTXCXXGEXICAYAACTGC

SEQ ID NO: 1756 - protein, 20 aa, Artificial Sequence
  Synthetically generated peptide
  VARIANT (1)...(20): Xaa = Any Amino Acid
PGTXCXXGEIXCAYAACTGC

SEQ ID NO: 1757 - protein, 20 aa, Artificial Sequence
  Synthetically generated peptide
  VARIANT (1)...(20): Xaa = Any Amino Acid
PGTXCXXGEICXAYAACTGC

SEQ ID NO: 1758 - protein, 20 aa, Artificial Sequence
  Synthetically generated peptide
  VARIANT (1)...(20): Xaa = Any Amino Acid
PGTXCXXGEICAXYAACTGC

SEQ ID NO: 1759 - protein, 20 aa, Artificial Sequence
  Synthetically generated peptide
  VARIANT (1)...(20): Xaa = Any Amino Acid
PGTXCXXGEICAYXAACTGC

SEQ ID NO: 1760 - protein, 20 aa, Artificial Sequence
  Synthetically generated peptide
  VARIANT (1)...(20): Xaa = Any Amino Acid
PGTXCXXGEICAYAXACTGC

SEQ ID NO: 1761 - protein, 20 aa, Artificial Sequence
  Synthetically generated peptide
  VARIANT (1)...(20): Xaa = Any Amino Acid
PGTXCXXGEICAYAAXCTGC

SEQ ID NO: 1762 - protein, 20 aa, Artificial Sequence
  Synthetically generated peptide
  VARIANT (1)...(20): Xaa = Any Amino Acid
PGTXCXXGEICAYAACXTGC

SEQ ID NO: 1763 - protein, 20 aa, Artificial Sequence
  Synthetically generated peptide
  VARIANT (1)...(20): Xaa = Any Amino Acid
PGTXCXXGEICAYAACTXGC

SEQ ID NO: 1764 - protein, 20 aa, Artificial Sequence
  Synthetically generated peptide
  VARIANT (1)...(20): Xaa = Any Amino Acid
PGTXCXXGEICAYAACTGXC

SEQ ID NO: 1765 - protein, 20 aa, Artificial Sequence
  Synthetically generated peptide
  VARIANT (1)...(20): Xaa = Any Amino Acid
PGTXCXXGEICAYAACTGCX

SEQ ID NO: 1766 - protein, 19 aa, Artificial Sequence
  Synthetically generated peptide
  VARIANT (1)...(19): Xaa = Any Amino Acid
PGTXCXGXEICAYAACTGC

SEQ ID NO: 1767 - protein, 20 aa, Artificial Sequence
  Synthetically generated peptide
  VARIANT (1)...(20): Xaa = Any Amino Acid
PGTXCXGXXEICAYAACTGC

SEQ ID NO: 1768 - protein, 20 aa, Artificial Sequence
  Synthetically generated peptide
  VARIANT (1)...(20): Xaa = Any Amino Acid
PGTXCXGXEXICAYAACTGC

SEQ ID NO: 1769 - protein, 20 aa, Artificial Sequence
  Synthetically generated peptide
  VARIANT (1)...(20): Xaa = Any Amino Acid
PGTXCXGXEIXCAYAACTGC

SEQ ID NO: 1770 - protein, 20 aa, Artificial Sequence
  Synthetically generated peptide
  VARIANT (1)...(20): Xaa = Any Amino Acid
PGTXCXGXEICXAYAACTGC

SEQ ID NO: 1771 - protein, 20 aa, Artificial Sequence
  Synthetically generated peptide
  VARIANT (1)...(20): Xaa = Any Amino Acid
PGTXCXGXEICAXYAACTGC

SEQ ID NO: 1772 - protein, 20 aa, Artificial Sequence
  Synthetically generated peptide
  VARIANT (1)...(20): Xaa = Any Amino Acid
PGTXCXGXEICAYXAACTGC

SEQ ID NO: 1773 - protein, 20 aa, Artificial Sequence
  Synthetically generated peptide
  VARIANT (1)...(20): Xaa = Any Amino Acid
PGTXCXGXEICAYAXACTGC

SEQ ID NO: 1774 - protein, 20 aa, Artificial Sequence
  Synthetically generated peptide
  VARIANT (1)...(20): Xaa = Any Amino Acid
PGTXCXGXEICAYAAXCTGC

SEQ ID NO: 1775 - protein, 20 aa, Artificial Sequence
  Synthetically generated peptide
  VARIANT (1)...(20): Xaa = Any Amino Acid
PGTXCXGXEICAYAACXTGC

SEQ ID NO: 1776 - protein, 20 aa, Artificial Sequence
  Synthetically generated peptide
  VARIANT (1)...(20): Xaa = Any Amino Acid
PGTXCXGXEICAYAACTXGC

SEQ ID NO: 1777 - protein, 20 aa, Artificial Sequence
  Synthetically generated peptide
  VARIANT (1)...(20): Xaa = Any Amino Acid
PGTXCXGXEICAYAACTGXC

SEQ ID NO: 1778 - protein, 20 aa, Artificial Sequence
  Synthetically generated peptide
  VARIANT (1)...(20): Xaa = Any Amino Acid
PGTXCXGXEICAYAACTGCX

SEQ ID NO: 1779 - protein, 19 aa, Artificial Sequence
  Synthetically generated peptide
  VARIANT (1)...(19): Xaa = Any Amino Acid
PGTXCXGEXICAYAACTGC

SEQ ID NO: 1780 - protein, 20 aa, Artificial Sequence
  Synthetically generated peptide
  VARIANT (1)...(20): Xaa = Any Amino Acid
PGTXCXGEXXICAYAACTGC

SEQ ID NO: 1781 - protein, 20 aa, Artificial Sequence
  Synthetically generated peptide
  VARIANT (1)...(20): Xaa = Any Amino Acid
PGTXCXGEXIXCAYAACTGC

SEQ ID NO: 1782 - protein, 20 aa, Artificial Sequence
  Synthetically generated peptide
  VARIANT (1)...(20): Xaa = Any Amino Acid
PGTXCXGEXICXAYAACTGC

SEQ ID NO: 1783 - protein, 20 aa, Artificial Sequence
  Synthetically generated peptide
  VARIANT (1)...(20): Xaa = Any Amino Acid
PGTXCXGEXICAXYAACTGC

SEQ ID NO: 1784 - protein, 20 aa, Artificial Sequence
  Synthetically generated peptide
  VARIANT (1)...(20): Xaa = Any Amino Acid
PGTXCXGEXICAYXAACTGC

SEQ ID NO: 1785 - protein, 20 aa, Artificial Sequence
  Synthetically generated peptide
  VARIANT (1)...(20): Xaa = Any Amino Acid
PGTXCXGEXICAYAXACTGC

SEQ ID NO: 1786 - protein, 20 aa, Artificial Sequence
  Synthetically generated peptide
  VARIANT (1)...(20): Xaa = Any Amino Acid
PGTXCXGEXICAYAAXCTGC

SEQ ID NO: 1787 - protein, 20 aa, Artificial Sequence
  Synthetically generated peptide
  VARIANT (1)...(20): Xaa = Any Amino Acid
PGTXCXGEXICAYAACXTGC

SEQ ID NO: 1788 - protein, 20 aa, Artificial Sequence
  Synthetically generated peptide
  VARIANT (1)...(20): Xaa = Any Amino Acid
PGTXCXGEXICAYAACTXGC

SEQ ID NO: 1789 - protein, 20 aa, Artificial Sequence
  Synthetically generated peptide
  VARIANT (1)...(20): Xaa = Any Amino Acid
PGTXCXGEXICAYAACTGXC

SEQ ID NO: 1790 - protein, 20 aa, Artificial Sequence
  Synthetically generated peptide
  VARIANT (1)...(20): Xaa = Any Amino Acid
PGTXCXGEXICAYAACTGCX

SEQ ID NO: 1791 - protein, 19 aa, Artificial Sequence
  Synthetically generated peptide
  VARIANT (1)...(19): Xaa = Any Amino Acid
PGTXCXGEIXCAYAACTGC

SEQ ID NO: 1792 - protein, 20 aa, Artificial Sequence
  Synthetically generated peptide
  VARIANT (1)...(20): Xaa = Any Amino Acid
PGTXCXGEIXXCAYAACTGC

SEQ ID NO: 1793 - protein, 20 aa, Artificial Sequence
  Synthetically generated peptide
  VARIANT (1)...(20): Xaa = Any Amino Acid
PGTXCXGEIXCXAYAACTGC

SEQ ID NO: 1794 - protein, 20 aa, Artificial Sequence
  Synthetically generated peptide
  VARIANT (1)...(20): Xaa = Any Amino Acid
PGTXCXGEIXCAXYAACTGC

SEQ ID NO: 1795 - protein, 20 aa, Artificial Sequence
  Synthetically generated peptide
  VARIANT (1)...(20): Xaa = Any Amino Acid
PGTXCXGEIXCAYXAACTGC

SEQ ID NO: 1796 - protein, 20 aa, Artificial Sequence
  Synthetically generated peptide
  VARIANT (1)...(20): Xaa = Any Amino Acid
PGTXCXGEIXCAYAXACTGC

SEQ ID NO: 1797 - protein, 20 aa, Artificial Sequence
  Synthetically generated peptide
  VARIANT (1)...(20): Xaa = Any Amino Acid
PGTXCXGEIXCAYAAXCTGC

SEQ ID NO: 1798 - protein, 20 aa, Artificial Sequence
  Synthetically generated peptide
  VARIANT (1)...(20): Xaa = Any Amino Acid
PGTXCXGEIXCAYAACXTGC

SEQ ID NO: 1799 - protein, 20 aa, Artificial Sequence
  Synthetically generated peptide
  VARIANT (1)...(20): Xaa = Any Amino Acid
PGTXCXGEIXCAYAACTXGC

SEQ ID NO: 1800 - protein, 20 aa, Artificial Sequence
  Synthetically generated peptide
  VARIANT (1)...(20): Xaa = Any Amino Acid
PGTXCXGEIXCAYAACTGXC

SEQ ID NO: 1801 - protein, 20 aa, Artificial Sequence
  Synthetically generated peptide
  VARIANT (1)...(20): Xaa = Any Amino Acid
PGTXCXGEIXCAYAACTGCX

SEQ ID NO: 1802 - protein, 19 aa, Artificial Sequence
  Synthetically generated peptide
  VARIANT (1)...(19): Xaa = Any Amino Acid
PGTXCXGEICXAYAACTGC

SEQ ID NO: 1803 - protein, 20 aa, Artificial Sequence
  Synthetically generated peptide
  VARIANT (1)...(20): Xaa = Any Amino Acid
PGTXCXGEICXXAYAACTGC

SEQ ID NO: 1804 - protein, 20 aa, Artificial Sequence
  Synthetically generated peptide
  VARIANT (1)...(20): Xaa = Any Amino Acid
PGTXCXGEICXAXYAACTGC

SEQ ID NO: 1805 - protein, 20 aa, Artificial Sequence
  Synthetically generated peptide
  VARIANT (1)...(20): Xaa = Any Amino Acid
PGTXCXGEICXAYXAACTGC

SEQ ID NO: 1806 - protein, 20 aa, Artificial Sequence
  Synthetically generated peptide
  VARIANT (1)...(20): Xaa = Any Amino Acid
PGTXCXGEICXAYAXACTGC

SEQ ID NO: 1807 - protein, 20 aa, Artificial Sequence
  Synthetically generated peptide
  VARIANT (1)...(20): Xaa = Any Amino Acid
PGTXCXGEICXAYAAXCTGC

SEQ ID NO: 1808 - protein, 20 aa, Artificial Sequence
  Synthetically generated peptide
  VARIANT (1)...(20): Xaa = Any Amino Acid
PGTXCXGEICXAYAACXTGC

SEQ ID NO: 1809 - protein, 20 aa, Artificial Sequence
  Synthetically generated peptide
  VARIANT (1)...(20): Xaa = Any Amino Acid
PGTXCXGEICXAYAACTXGC

SEQ ID NO: 1810 - protein, 20 aa, Artificial Sequence
  Synthetically generated peptide
  VARIANT (1)...(20): Xaa = Any Amino Acid
PGTXCXGEICXAYAACTGXC

SEQ ID NO: 1811 - protein, 20 aa, Artificial Sequence
  Synthetically generated peptide
  VARIANT (1)...(20): Xaa = Any Amino Acid
PGTXCXGEICXAYAACTGCX

SEQ ID NO: 1812 - protein, 19 aa, Artificial Sequence
  Synthetically generated peptide
  VARIANT (1)...(19): Xaa = Any Amino Acid
PGTXCXGEICAXYAACTGC

SEQ ID NO: 1813 - protein, 20 aa, Artificial Sequence
  Synthetically generated peptide
  VARIANT (1)...(20): Xaa = Any Amino Acid
PGTXCXGEICAXXYAACTGC

SEQ ID NO: 1814 - protein, 20 aa, Artificial Sequence
  Synthetically generated peptide
  VARIANT (1)...(20): Xaa = Any Amino Acid
PGTXCXGEICAXYXAACTGC

SEQ ID NO: 1815 - protein, 20 aa, Artificial Sequence
  Synthetically generated peptide
  VARIANT (1)...(20): Xaa = Any Amino Acid
PGTXCXGEICAXYAXACTGC

SEQ ID NO: 1816 - protein, 20 aa, Artificial Sequence
  Synthetically generated peptide
  VARIANT (1)...(20): Xaa = Any Amino Acid
PGTXCXGEICAXYAAXCTGC

SEQ ID NO: 1817 - protein, 20 aa, Artificial Sequence
  Synthetically generated peptide
  VARIANT (1)...(20): Xaa = Any Amino Acid
PGTXCXGEICAXYAACXTGC

SEQ ID NO: 1818 - protein, 20 aa, Artificial Sequence
  Synthetically generated peptide
  VARIANT (1)...(20): Xaa = Any Amino Acid
PGTXCXGEICAXYAACTXGC

SEQ ID NO: 1819 - protein, 20 aa, Artificial Sequence
  Synthetically generated peptide
  VARIANT (1)...(20): Xaa = Any Amino Acid
PGTXCXGEICAXYAACTGXC

SEQ ID NO: 1820 - protein, 20 aa, Artificial Sequence
  Synthetically generated peptide
  VARIANT (1)...(20): Xaa = Any Amino Acid
PGTXCXGEICAXYAACTGCX

SEQ ID NO: 1821 - protein, 19 aa, Artificial Sequence
  Synthetically generated peptide
  VARIANT (1)...(19): Xaa = Any Amino Acid
PGTXCXGEICAYXAACTGC

SEQ ID NO: 1822 - protein, 20 aa, Artificial Sequence
  Synthetically generated peptide
  VARIANT (1)...(20): Xaa = Any Amino Acid
PGTXCXGEICAYXXAACTGC

SEQ ID NO: 1823 - protein, 20 aa, Artificial Sequence
  Synthetically generated peptide
  VARIANT (1)...(20): Xaa = Any Amino Acid
PGTXCXGEICAYXAXACTGC

SEQ ID NO: 1824 - protein, 20 aa, Artificial Sequence
  Synthetically generated peptide
  VARIANT (1)...(20): Xaa = Any Amino Acid
PGTXCXGEICAYXAAXCTGC

SEQ ID NO: 1825 - protein, 20 aa, Artificial Sequence
  Synthetically generated peptide
  VARIANT (1)...(20): Xaa = Any Amino Acid
PGTXCXGEICAYXAACXTGC

SEQ ID NO: 1826 - protein, 20 aa, Artificial Sequence
  Synthetically generated peptide
  VARIANT (1)...(20): Xaa = Any Amino Acid
PGTXCXGEICAYXAACTXGC

SEQ ID NO: 1827 - protein, 20 aa, Artificial Sequence
  Synthetically generated peptide
  VARIANT (1)...(20): Xaa = Any Amino Acid
PGTXCXGEICAYXAACTGXC

SEQ ID NO: 1828 - protein, 20 aa, Artificial Sequence
  Synthetically generated peptide
  VARIANT (1)...(20): Xaa = Any Amino Acid
PGTXCXGEICAYXAACTGCX

SEQ ID NO: 1829 - protein, 19 aa, Artificial Sequence
  Synthetically generated peptide
  VARIANT (1)...(19): Xaa = Any Amino Acid
PGTXCXGEICAYAXACTGC

SEQ ID NO: 1830 - protein, 20 aa, Artificial Sequence
  Synthetically generated peptide
  VARIANT (1)...(20): Xaa = Any Amino Acid
PGTXCXGEICAYAXXACTGC

SEQ ID NO: 1831 - protein, 20 aa, Artificial Sequence
  Synthetically generated peptide
  VARIANT (1)...(20): Xaa = Any Amino Acid
PGTXCXGEICAYAXAXCTGC

SEQ ID NO: 1832 - protein, 20 aa, Artificial Sequence
  Synthetically generated peptide
  VARIANT (1)...(20): Xaa = Any Amino Acid
PGTXCXGEICAYAXACXTGC

SEQ ID NO: 1833 - protein, 20 aa, Artificial Sequence
  Synthetically generated peptide
  VARIANT (1)...(20): Xaa = Any Amino Acid
PGTXCXGEICAYAXACTXGC

SEQ ID NO: 1834 - protein, 20 aa, Artificial Sequence
  Synthetically generated peptide
  VARIANT (1)...(20): Xaa = Any Amino Acid
PGTXCXGEICAYAXACTGXC

SEQ ID NO: 1835 - protein, 20 aa, Artificial Sequence
  Synthetically generated peptide
  VARIANT (1)...(20): Xaa = Any Amino Acid
PGTXCXGEICAYAXACTGCX

SEQ ID NO: 1836 - protein, 19 aa, Artificial Sequence
  Synthetically generated peptide
  VARIANT (1)...(19): Xaa = Any Amino Acid
PGTXCXGEICAYAAXCTGC

SEQ ID NO: 1837 - protein, 20 aa, Artificial Sequence
  Synthetically generated peptide
  VARIANT (1)...(20): Xaa = Any Amino Acid
PGTXCXGEICAYAAXXCTGC

SEQ ID NO: 1838 - protein, 20 aa, Artificial Sequence
  Synthetically generated peptide
  VARIANT (1)...(20): Xaa = Any Amino Acid
PGTXCXGEICAYAAXCXTGC

SEQ ID NO: 1839 - protein, 20 aa, Artificial Sequence
  Synthetically generated peptide
  VARIANT (1)...(20): Xaa = Any Amino Acid
PGTXCXGEICAYAAXCTXGC

SEQ ID NO: 1840 - protein, 20 aa, Artificial Sequence
  Synthetically generated peptide
  VARIANT (1)...(20): Xaa = Any Amino Acid
PGTXCXGEICAYAAXCTGXC

SEQ ID NO: 1841 - protein, 20 aa, Artificial Sequence
  Synthetically generated peptide
  VARIANT (1)...(20): Xaa = Any Amino Acid
PGTXCXGEICAYAAXCTGCX

SEQ ID NO: 1842 - protein, 19 aa, Artificial Sequence
  Synthetically generated peptide
  VARIANT (1)...(19): Xaa = Any Amino Acid
PGTXCXGEICAYAACXTGC

SEQ ID NO: 1843 - protein, 20 aa, Artificial Sequence
  Synthetically generated peptide
  VARIANT (1)...(20): Xaa = Any Amino Acid
PGTXCXGEICAYAACXXTGC

SEQ ID NO: 1844 - protein, 20 aa, Artificial Sequence
  Synthetically generated peptide
  VARIANT (1)...(20): Xaa = Any Amino Acid
PGTXCXGEICAYAACXTXGC

SEQ ID NO: 1845 - protein, 20 aa, Artificial Sequence
  Synthetically generated peptide
  VARIANT (1)...(20): Xaa = Any Amino Acid
PGTXCXGEICAYAACXTGXC

SEQ ID NO: 1846 - protein, 20 aa, Artificial Sequence
  Synthetically generated peptide
  VARIANT (1)...(20): Xaa = Any Amino Acid
PGTXCXGEICAYAACXTGCX

SEQ ID NO: 1847 - protein, 19 aa, Artificial Sequence
  Synthetically generated peptide
  VARIANT (1)...(19): Xaa = Any Amino Acid
PGTXCXGEICAYAACTXGC

SEQ ID NO: 1848 - protein, 20 aa, Artificial Sequence
  Synthetically generated peptide
  VARIANT (1)...(20): Xaa = Any Amino Acid
PGTXCXGEICAYAACTXXGC

SEQ ID NO: 1849 - protein, 20 aa, Artificial Sequence
  Synthetically generated peptide
  VARIANT (1)...(20): Xaa = Any Amino Acid
PGTXCXGEICAYAACTXGXC

SEQ ID NO: 1850 - protein, 20 aa, Artificial Sequence
  Synthetically generated peptide
  VARIANT (1)...(20): Xaa = Any Amino Acid
PGTXCXGEICAYAACTXGCX

SEQ ID NO: 1851 - protein, 19 aa, Artificial Sequence
  Synthetically generated peptide
  VARIANT (1)...(19): Xaa = Any Amino Acid
PGTXCXGEICAYAACTGXC

SEQ ID NO: 1852 - protein, 20 aa, Artificial Sequence
  Synthetically generated peptide
  VARIANT (1)...(20): Xaa = Any Amino Acid
PGTXCXGEICAYAACTGXXC

SEQ ID NO: 1853 - protein, 20 aa, Artificial Sequence
  Synthetically generated peptide
  VARIANT (1)...(20): Xaa = Any Amino Acid
PGTXCXGEICAYAACTGXCX

SEQ ID NO: 1854 - protein, 19 aa, Artificial Sequence
  Synthetically generated peptide
  VARIANT (1)...(19): Xaa = Any Amino Acid
PGTXCXGEICAYAACTGCX

SEQ ID NO: 1855 - protein, 20 aa, Artificial Sequence
  Synthetically generated peptide
  VARIANT (1)...(20): Xaa = Any Amino Acid
PGTXCXGEICAYAACTGCXX

SEQ ID NO: 1856 - protein, 18 aa, Artificial Sequence
  Synthetically generated peptide
  VARIANT (1)...(18): Xaa = Any Amino Acid
PGTXCGXEICAYAACTGC

SEQ ID NO: 1857 - protein, 19 aa, Artificial Sequence
  Synthetically generated peptide
  VARIANT (1)...(19): Xaa = Any Amino Acid
PGTXCGXXEICAYAACTGC

SEQ ID NO: 1858 - protein, 20 aa, Artificial Sequence
  Synthetically generated peptide
  VARIANT (1)...(20): Xaa = Any Amino Acid
PGTXCGXXXEICAYAACTGC

SEQ ID NO: 1859 - protein, 20 aa, Artificial Sequence
  Synthetically generated peptide
  VARIANT (1)...(20): Xaa = Any Amino Acid
PGTXCGXXEXICAYAACTGC

SEQ ID NO: 1860 - protein, 20 aa, Artificial Sequence
  Synthetically generated peptide
  VARIANT (1)...(20): Xaa = Any Amino Acid
PGTXCGXXEIXCAYAACTGC

SEQ ID NO: 1861 - protein, 20 aa, Artificial Sequence
  Synthetically generated peptide
  VARIANT (1)...(20): Xaa = Any Amino Acid
PGTXCGXXEICXAYAACTGC

SEQ ID NO: 1862 - protein, 20 aa, Artificial Sequence
  Synthetically generated peptide
  VARIANT (1)...(20): Xaa = Any Amino Acid
PGTXCGXXEICAXYAACTGC

SEQ ID NO: 1863 - protein, 20 aa, Artificial Sequence
  Synthetically generated peptide
  VARIANT (1)...(20): Xaa = Any Amino Acid
PGTXCGXXEICAYXAACTGC

SEQ ID NO: 1864 - protein, 20 aa, Artificial Sequence
  Synthetically generated peptide
  VARIANT (1)...(20): Xaa = Any Amino Acid
PGTXCGXXEICAYAXACTGC

SEQ ID NO: 1865 - protein, 20 aa, Artificial Sequence
  Synthetically generated peptide
  VARIANT (1)...(20): Xaa = Any Amino Acid
PGTXCGXXEICAYAAXCTGC

SEQ ID NO: 1866 - protein, 20 aa, Artificial Sequence
  Synthetically generated peptide
  VARIANT (1)...(20): Xaa = Any Amino Acid
PGTXCGXXEICAYAACXTGC

SEQ ID NO: 1867 - protein, 20 aa, Artificial Sequence
  Synthetically generated peptide
  VARIANT (1)...(20): Xaa = Any Amino Acid
PGTXCGXXEICAYAACTXGC

SEQ ID NO: 1868 - protein, 20 aa, Artificial Sequence
  Synthetically generated peptide
  VARIANT (1)...(20): Xaa = Any Amino Acid
PGTXCGXXEICAYAACTGXC

SEQ ID NO: 1869 - protein, 20 aa, Artificial Sequence
  Synthetically generated peptide
  VARIANT (1)...(20): Xaa = Any Amino Acid
PGTXCGXXEICAYAACTGCX

SEQ ID NO: 1870 - protein, 19 aa, Artificial Sequence
  Synthetically generated peptide
  VARIANT (1)...(19): Xaa = Any Amino Acid
PGTXCGXEXICAYAACTGC

SEQ ID NO: 1871 - protein, 20 aa, Artificial Sequence
  Synthetically generated peptide
  VARIANT (1)...(20): Xaa = Any Amino Acid
PGTXCGXEXXICAYAACTGC

SEQ ID NO: 1872 - protein, 20 aa, Artificial Sequence
  Synthetically generated peptide
  VARIANT (1)...(20): Xaa = Any Amino Acid
PGTXCGXEXIXCAYAACTGC

SEQ ID NO: 1873 - protein, 20 aa, Artificial Sequence
  Synthetically generated peptide
  VARIANT (1)...(20): Xaa = Any Amino Acid
PGTXCGXEXICXAYAACTGC

SEQ ID NO: 1874 - protein, 20 aa, Artificial Sequence
  Synthetically generated peptide
  VARIANT (1)...(20): Xaa = Any Amino Acid
PGTXCGXEXICAXYAACTGC

SEQ ID NO: 1875 - protein, 20 aa, Artificial Sequence
  Synthetically generated peptide
  VARIANT (1)...(20): Xaa = Any Amino Acid
PGTXCGXEXICAYXAACTGC

SEQ ID NO: 1876 - protein, 20 aa, Artificial Sequence
  Synthetically generated peptide
  VARIANT (1)...(20): Xaa = Any Amino Acid
PGTXCGXEXICAYAXACTGC

SEQ ID NO: 1877 - protein, 20 aa, Artificial Sequence
  Synthetically generated peptide
  VARIANT (1)...(20): Xaa = Any Amino Acid
PGTXCGXEXICAYAAXCTGC

SEQ ID NO: 1878 - protein, 20 aa, Artificial Sequence
  Synthetically generated peptide
  VARIANT (1)...(20): Xaa = Any Amino Acid
PGTXCGXEXICAYAACXTGC

SEQ ID NO: 1879 - protein, 20 aa, Artificial Sequence
  Synthetically generated peptide
  VARIANT (1)...(20): Xaa = Any Amino Acid
PGTXCGXEXICAYAACTXGC

SEQ ID NO: 1880 - protein, 20 aa, Artificial Sequence
  Synthetically generated peptide
  VARIANT (1)...(20): Xaa = Any Amino Acid
PGTXCGXEXICAYAACTGXC

SEQ ID NO: 1881 - protein, 20 aa, Artificial Sequence
  Synthetically generated peptide
  VARIANT (1)...(20): Xaa = Any Amino Acid
PGTXCGXEXICAYAACTGCX

SEQ ID NO: 1882 - protein, 19 aa, Artificial Sequence
  Synthetically generated peptide
  VARIANT (1)...(19): Xaa = Any Amino Acid
PGTXCGXEIXCAYAACTGC

SEQ ID NO: 1883 - protein, 20 aa, Artificial Sequence
  Synthetically generated peptide
  VARIANT (1)...(20): Xaa = Any Amino Acid
PGTXCGXEIXXCAYAACTGC

SEQ ID NO: 1884 - protein, 20 aa, Artificial Sequence
  Synthetically generated peptide
  VARIANT (1)...(20): Xaa = Any Amino Acid
PGTXCGXEIXCXAYAACTGC

SEQ ID NO: 1885 - protein, 20 aa, Artificial Sequence
  Synthetically generated peptide
  VARIANT (1)...(20): Xaa = Any Amino Acid
PGTXCGXEIXCAXYAACTGC

SEQ ID NO: 1886 - protein, 20 aa, Artificial Sequence
  Synthetically generated peptide
  VARIANT (1)...(20): Xaa = Any Amino Acid
PGTXCGXEIXCAYXAACTGC

SEQ ID NO: 1887 - protein, 20 aa, Artificial Sequence
  Synthetically generated peptide
  VARIANT (1)...(20): Xaa = Any Amino Acid
PGTXCGXEIXCAYAXACTGC

SEQ ID NO: 1888 - protein, 20 aa, Artificial Sequence
  Synthetically generated peptide
  VARIANT (1)...(20): Xaa = Any Amino Acid
PGTXCGXEIXCAYAAXCTGC

SEQ ID NO: 1889 - protein, 20 aa, Artificial Sequence
  Synthetically generated peptide
  VARIANT (1)...(20): Xaa = Any Amino Acid
PGTXCGXEIXCAYAACXTGC

SEQ ID NO: 1890 - protein, 20 aa, Artificial Sequence
  Synthetically generated peptide
  VARIANT (1)...(20): Xaa = Any Amino Acid
PGTXCGXEIXCAYAACTXGC

SEQ ID NO: 1891 - protein, 20 aa, Artificial Sequence
  Synthetically generated peptide
  VARIANT (1)...(20): Xaa = Any Amino Acid
PGTXCGXEIXCAYAACTGXC

SEQ ID NO: 1892 - protein, 20 aa, Artificial Sequence
  Synthetically generated peptide
  VARIANT (1)...(20): Xaa = Any Amino Acid
PGTXCGXEIXCAYAACTGCX

SEQ ID NO: 1893 - protein, 19 aa, Artificial Sequence
  Synthetically generated peptide
  VARIANT (1)...(19): Xaa = Any Amino Acid
PGTXCGXEICXAYAACTGC

SEQ ID NO: 1894 - protein, 20 aa, Artificial Sequence
  Synthetically generated peptide
  VARIANT (1)...(20): Xaa = Any Amino Acid
PGTXCGXEICXXAYAACTGC

SEQ ID NO: 1895 - protein, 20 aa, Artificial Sequence
  Synthetically generated peptide
  VARIANT (1)...(20): Xaa = Any Amino Acid
PGTXCGXEICXAXYAACTGC

SEQ ID NO: 1896 - protein, 20 aa, Artificial Sequence
  Synthetically generated peptide
  VARIANT (1)...(20): Xaa = Any Amino Acid
PGTXCGXEICXAYXAACTGC

SEQ ID NO: 1897 - protein, 20 aa, Artificial Sequence
  Synthetically generated peptide
  VARIANT (1)...(20): Xaa = Any Amino Acid
PGTXCGXEICXAYAXACTGC

SEQ ID NO: 1898 - protein, 20 aa, Artificial Sequence
  Synthetically generated peptide
  VARIANT (1)...(20): Xaa = Any Amino Acid
PGTXCGXEICXAYAAXCTGC

SEQ ID NO: 1899 - protein, 20 aa, Artificial Sequence
  Synthetically generated peptide
  VARIANT (1)...(20): Xaa = Any Amino Acid
PGTXCGXEICXAYAACXTGC

SEQ ID NO: 1900 - protein, 20 aa, Artificial Sequence
  Synthetically generated peptide
  VARIANT (1)...(20): Xaa = Any Amino Acid
PGTXCGXEICXAYAACTXGC

SEQ ID NO: 1901 - protein, 20 aa, Artificial Sequence
  Synthetically generated peptide
  VARIANT (1)...(20): Xaa = Any Amino Acid
PGTXCGXEICXAYAACTGXC

SEQ ID NO: 1902 - protein, 20 aa, Artificial Sequence
  Synthetically generated peptide
  VARIANT (1)...(20): Xaa = Any Amino Acid
PGTXCGXEICXAYAACTGCX

SEQ ID NO: 1903 - protein, 19 aa, Artificial Sequence
  Synthetically generated peptide
  VARIANT (1)...(19): Xaa = Any Amino Acid
PGTXCGXEICAXYAACTGC

SEQ ID NO: 1904 - protein, 20 aa, Artificial Sequence
  Synthetically generated peptide
  VARIANT (1)...(20): Xaa = Any Amino Acid
PGTXCGXEICAXXYAACTGC

SEQ ID NO: 1905 - protein, 20 aa, Artificial Sequence
  Synthetically generated peptide
  VARIANT (1)...(20): Xaa = Any Amino Acid
PGTXCGXEICAXYXAACTGC

SEQ ID NO: 1906 - protein, 20 aa, Artificial Sequence
  Synthetically generated peptide
  VARIANT (1)...(20): Xaa = Any Amino Acid
PGTXCGXEICAXYAXACTGC

SEQ ID NO: 1907 - protein, 20 aa, Artificial Sequence
  Synthetically generated peptide
  VARIANT (1)...(20): Xaa = Any Amino Acid
PGTXCGXEICAXYAAXCTGC

SEQ ID NO: 1908 - protein, 20 aa, Artificial Sequence
  Synthetically generated peptide
  VARIANT (1)...(20): Xaa = Any Amino Acid
PGTXCGXEICAXYAACXTGC

SEQ ID NO: 1909 - protein, 20 aa, Artificial Sequence
  Synthetically generated peptide
  VARIANT (1)...(20): Xaa = Any Amino Acid
PGTXCGXEICAXYAACTXGC

SEQ ID NO: 1910 - protein, 20 aa, Artificial Sequence
  Synthetically generated peptide
  VARIANT (1)...(20): Xaa = Any Amino Acid
PGTXCGXEICAXYAACTGXC

SEQ ID NO: 1911 - protein, 20 aa, Artificial Sequence
  Synthetically generated peptide
  VARIANT (1)...(20): Xaa = Any Amino Acid
PGTXCGXEICAXYAACTGCX

SEQ ID NO: 1912 - protein, 19 aa, Artificial Sequence
  Synthetically generated peptide
  VARIANT (1)...(19): Xaa = Any Amino Acid
PGTXCGXEICAYXAACTGC

SEQ ID NO: 1913 - protein, 20 aa, Artificial Sequence
  Synthetically generated peptide
  VARIANT (1)...(20): Xaa = Any Amino Acid
PGTXCGXEICAYXXAACTGC

SEQ ID NO: 1914 - protein, 20 aa, Artificial Sequence
  Synthetically generated peptide
  VARIANT (1)...(20): Xaa = Any Amino Acid
PGTXCGXEICAYXAXACTGC

SEQ ID NO: 1915 - protein, 20 aa, Artificial Sequence
  Synthetically generated peptide
  VARIANT (1)...(20): Xaa = Any Amino Acid
PGTXCGXEICAYXAAXCTGC

SEQ ID NO: 1916 - protein, 20 aa, Artificial Sequence
  Synthetically generated peptide
  VARIANT (1)...(20): Xaa = Any Amino Acid
PGTXCGXEICAYXAACXTGC

SEQ ID NO: 1917 - protein, 20 aa, Artificial Sequence
  Synthetically generated peptide
  VARIANT (1)...(20): Xaa = Any Amino Acid
PGTXCGXEICAYXAACTXGC

SEQ ID NO: 1918 - protein, 20 aa, Artificial Sequence
  Synthetically generated peptide
  VARIANT (1)...(20): Xaa = Any Amino Acid
PGTXCGXEICAYXAACTGXC

SEQ ID NO: 1919 - protein, 20 aa, Artificial Sequence
  Synthetically generated peptide
  VARIANT (1)...(20): Xaa = Any Amino Acid
PGTXCGXEICAYXAACTGCX

SEQ ID NO: 1920 - protein, 19 aa, Artificial Sequence
  Synthetically generated peptide
  VARIANT (1)...(19): Xaa = Any Amino Acid
PGTXCGXEICAYAXACTGC

SEQ ID NO: 1921 - protein, 20 aa, Artificial Sequence
  Synthetically generated peptide
  VARIANT (1)...(20): Xaa = Any Amino Acid
PGTXCGXEICAYAXXACTGC

SEQ ID NO: 1922 - protein, 20 aa, Artificial Sequence
  Synthetically generated peptide
  VARIANT (1)...(20): Xaa = Any Amino Acid
PGTXCGXEICAYAXAXCTGC

SEQ ID NO: 1923 - protein, 20 aa, Artificial Sequence
  Synthetically generated peptide
  VARIANT (1)...(20): Xaa = Any Amino Acid
PGTXCGXEICAYAXACXTGC

SEQ ID NO: 1924 - protein, 20 aa, Artificial Sequence
  Synthetically generated peptide
  VARIANT (1)...(20): Xaa = Any Amino Acid
PGTXCGXEICAYAXACTXGC

SEQ ID NO: 1925 - protein, 20 aa, Artificial Sequence
  Synthetically generated peptide
  VARIANT (1)...(20): Xaa = Any Amino Acid
PGTXCGXEICAYAXACTGXC

SEQ ID NO: 1926 - protein, 20 aa, Artificial Sequence
  Synthetically generated peptide
  VARIANT (1)...(20): Xaa = Any Amino Acid
PGTXCGXEICAYAXACTGCX

SEQ ID NO: 1927 - protein, 19 aa, Artificial Sequence
  Synthetically generated peptide
  VARIANT (1)...(19): Xaa = Any Amino Acid
PGTXCGXEICAYAAXCTGC

SEQ ID NO: 1928 - protein, 20 aa, Artificial Sequence
  Synthetically generated peptide
  VARIANT (1)...(20): Xaa = Any Amino Acid
PGTXCGXEICAYAAXXCTGC

SEQ ID NO: 1929 - protein, 20 aa, Artificial Sequence
  Synthetically generated peptide
  VARIANT (1)...(20): Xaa = Any Amino Acid
PGTXCGXEICAYAAXCXTGC

SEQ ID NO: 1930 - protein, 20 aa, Artificial Sequence
  Synthetically generated peptide
  VARIANT (1)...(20): Xaa = Any Amino Acid
PGTXCGXEICAYAAXCTXGC

SEQ ID NO: 1931 - protein, 20 aa, Artificial Sequence
  Synthetically generated peptide
  VARIANT (1)...(20): Xaa = Any Amino Acid
PGTXCGXEICAYAAXCTGXC

SEQ ID NO: 1932 - protein, 20 aa, Artificial Sequence
  Synthetically generated peptide
  VARIANT (1)...(20): Xaa = Any Amino Acid
PGTXCGXEICAYAAXCTGCX

SEQ ID NO: 1933 - protein, 19 aa, Artificial Sequence
  Synthetically generated peptide
  VARIANT (1)...(19): Xaa = Any Amino Acid
PGTXCGXEICAYAACXTGC

SEQ ID NO: 1934 - protein, 20 aa, Artificial Sequence
  Synthetically generated peptide
  VARIANT (1)...(20): Xaa = Any Amino Acid
PGTXCGXEICAYAACXXTGC

SEQ ID NO: 1935 - protein, 20 aa, Artificial Sequence
  Synthetically generated peptide
  VARIANT (1)...(20): Xaa = Any Amino Acid
PGTXCGXEICAYAACXTXGC

SEQ ID NO: 1936 - protein, 20 aa, Artificial Sequence
  Synthetically generated peptide
  VARIANT (1)...(20): Xaa = Any Amino Acid
PGTXCGXEICAYAACXTGXC

SEQ ID NO: 1937 - protein, 20 aa, Artificial Sequence
  Synthetically generated peptide
  VARIANT (1)...(20): Xaa = Any Amino Acid
PGTXCGXEICAYAACXTGCX

SEQ ID NO: 1938 - protein, 19 aa, Artificial Sequence
  Synthetically generated peptide
  VARIANT (1)...(19): Xaa = Any Amino Acid
PGTXCGXEICAYAACTXGC

SEQ ID NO: 1939 - protein, 20 aa, Artificial Sequence
  Synthetically generated peptide
  VARIANT (1)...(20): Xaa = Any Amino Acid
PGTXCGXEICAYAACTXXGC

SEQ ID NO: 1940 - protein, 20 aa, Artificial Sequence
  Synthetically generated peptide
  VARIANT (1)...(20): Xaa = Any Amino Acid
PGTXCGXEICAYAACTXGXC

SEQ ID NO: 1941 - protein, 20 aa, Artificial Sequence
  Synthetically generated peptide
  VARIANT (1)...(20): Xaa = Any Amino Acid
PGTXCGXEICAYAACTXGCX

SEQ ID NO: 1942 - protein, 19 aa, Artificial Sequence
  Synthetically generated peptide
  VARIANT (1)...(19): Xaa = Any Amino Acid
PGTXCGXEICAYAACTGXC

SEQ ID NO: 1943 - protein, 20 aa, Artificial Sequence
  Synthetically generated peptide
  VARIANT (1)...(20): Xaa = Any Amino Acid
PGTXCGXEICAYAACTGXXC

SEQ ID NO: 1944 - protein, 20 aa, Artificial Sequence
  Synthetically generated peptide
  VARIANT (1)...(20): Xaa = Any Amino Acid
PGTXCGXEICAYAACTGXCX

SEQ ID NO: 1945 - protein, 19 aa, Artificial Sequence
  Synthetically generated peptide
  VARIANT (1)...(19): Xaa = Any Amino Acid
PGTXCGXEICAYAACTGCX

SEQ ID NO: 1946 - protein, 20 aa, Artificial Sequence
  Synthetically generated peptide
  VARIANT (1)...(20): Xaa = Any Amino Acid
PGTXCGXEICAYAACTGCXX

SEQ ID NO: 1947 - protein, 18 aa, Artificial Sequence
  Synthetically generated peptide
  VARIANT (1)...(18): Xaa = Any Amino Acid
PGTXCGEXICAYAACTGC

SEQ ID NO: 1948 - protein, 19 aa, Artificial Sequence
  Synthetically generated peptide
  VARIANT (1)...(19): Xaa = Any Amino Acid
PGTXCGEXXICAYAACTGC

SEQ ID NO: 1949 - protein, 20 aa, Artificial Sequence
  Synthetically generated peptide
  VARIANT (1)...(20): Xaa = Any Amino Acid
PGTXCGEXXXICAYAACTGC

SEQ ID NO: 1950 - protein, 20 aa, Artificial Sequence
  Synthetically generated peptide
  VARIANT (1)...(20): Xaa = Any Amino Acid
PGTXCGEXXIXCAYAACTGC

SEQ ID NO: 1951 - protein, 20 aa, Artificial Sequence
  Synthetically generated peptide
  VARIANT (1)...(20): Xaa = Any Amino Acid
PGTXCGEXXICXAYAACTGC

SEQ ID NO: 1952 - protein, 20 aa, Artificial Sequence
  Synthetically generated peptide
  VARIANT (1)...(20): Xaa = Any Amino Acid
PGTXCGEXXICAXYAACTGC

SEQ ID NO: 1953 - protein, 20 aa, Artificial Sequence
  Synthetically generated peptide
  VARIANT (1)...(20): Xaa = Any Amino Acid
PGTXCGEXXICAYXAACTGC

SEQ ID NO: 1954 - protein, 20 aa, Artificial Sequence
  Synthetically generated peptide
  VARIANT (1)...(20): Xaa = Any Amino Acid
PGTXCGEXXICAYAXACTGC

SEQ ID NO: 1955 - protein, 20 aa, Artificial Sequence
  Synthetically generated peptide
  VARIANT (1)...(20): Xaa = Any Amino Acid
PGTXCGEXXICAYAAXCTGC

SEQ ID NO: 1956 - protein, 20 aa, Artificial Sequence
  Synthetically generated peptide
  VARIANT (1)...(20): Xaa = Any Amino Acid
PGTXCGEXXICAYAACXTGC

SEQ ID NO: 1957 - protein, 20 aa, Artificial Sequence
  Synthetically generated peptide
  VARIANT (1)...(20): Xaa = Any Amino Acid
PGTXCGEXXICAYAACTXGC

SEQ ID NO: 1958 - protein, 20 aa, Artificial Sequence
  Synthetically generated peptide
  VARIANT (1)...(20): Xaa = Any Amino Acid
PGTXCGEXXICAYAACTGXC

SEQ ID NO: 1959 - protein, 20 aa, Artificial Sequence
  Synthetically generated peptide
  VARIANT (1)...(20): Xaa = Any Amino Acid
PGTXCGEXXICAYAACTGCX

SEQ ID NO: 1960 - protein, 19 aa, Artificial Sequence
  Synthetically generated peptide
  VARIANT (1)...(19): Xaa = Any Amino Acid
PGTXCGEXIXCAYAACTGC

SEQ ID NO: 1961 - protein, 20 aa, Artificial Sequence
  Synthetically generated peptide
  VARIANT (1)...(20): Xaa = Any Amino Acid
PGTXCGEXIXXCAYAACTGC

SEQ ID NO: 1962 - protein, 20 aa, Artificial Sequence
  Synthetically generated peptide
  VARIANT (1)...(20): Xaa = Any Amino Acid
PGTXCGEXIXCXAYAACTGC

SEQ ID NO: 1963 - protein, 20 aa, Artificial Sequence
  Synthetically generated peptide
  VARIANT (1)...(20): Xaa = Any Amino Acid
PGTXCGEXIXCAXYAACTGC

SEQ ID NO: 1964 - protein, 20 aa, Artificial Sequence
  Synthetically generated peptide
  VARIANT (1)...(20): Xaa = Any Amino Acid
PGTXCGEXIXCAYXAACTGC

SEQ ID NO: 1965 - protein, 20 aa, Artificial Sequence
  Synthetically generated peptide
  VARIANT (1)...(20): Xaa = Any Amino Acid
PGTXCGEXIXCAYAXACTGC

SEQ ID NO: 1966 - protein, 20 aa, Artificial Sequence
  Synthetically generated peptide
  VARIANT (1)...(20): Xaa = Any Amino Acid
PGTXCGEXIXCAYAAXCTGC

SEQ ID NO: 1967 - protein, 20 aa, Artificial Sequence
  Synthetically generated peptide
  VARIANT (1)...(20): Xaa = Any Amino Acid
PGTXCGEXIXCAYAACXTGC

SEQ ID NO: 1968 - protein, 20 aa, Artificial Sequence
  Synthetically generated peptide
  VARIANT (1)...(20): Xaa = Any Amino Acid
PGTXCGEXIXCAYAACTXGC

SEQ ID NO: 1969 - protein, 20 aa, Artificial Sequence
  Synthetically generated peptide
  VARIANT (1)...(20): Xaa = Any Amino Acid
PGTXCGEXIXCAYAACTGXC

SEQ ID NO: 1970 - protein, 20 aa, Artificial Sequence
  Synthetically generated peptide
  VARIANT (1)...(20): Xaa = Any Amino Acid
PGTXCGEXIXCAYAACTGCX

SEQ ID NO: 1971 - protein, 19 aa, Artificial Sequence
  Synthetically generated peptide
  VARIANT (1)...(19): Xaa = Any Amino Acid
PGTXCGEXICXAYAACTGC

SEQ ID NO: 1972 - protein, 20 aa, Artificial Sequence
  Synthetically generated peptide
  VARIANT (1)...(20): Xaa = Any Amino Acid
PGTXCGEXICXXAYAACTGC

SEQ ID NO: 1973 - protein, 20 aa, Artificial Sequence
  Synthetically generated peptide
  VARIANT (1)...(20): Xaa = Any Amino Acid
PGTXCGEXICXAXYAACTGC

SEQ ID NO: 1974 - protein, 20 aa, Artificial Sequence
  Synthetically generated peptide
  VARIANT (1)...(20): Xaa = Any Amino Acid
PGTXCGEXICXAYXAACTGC

SEQ ID NO: 1975 - protein, 20 aa, Artificial Sequence
  Synthetically generated peptide
  VARIANT (1)...(20): Xaa = Any Amino Acid
PGTXCGEXICXAYAXACTGC

SEQ ID NO: 1976 - protein, 20 aa, Artificial Sequence
  Synthetically generated peptide
  VARIANT (1)...(20): Xaa = Any Amino Acid
PGTXCGEXICXAYAAXCTGC

SEQ ID NO: 1977 - protein, 20 aa, Artificial Sequence
  Synthetically generated peptide
  VARIANT (1)...(20): Xaa = Any Amino Acid
PGTXCGEXICXAYAACXTGC

SEQ ID NO: 1978 - protein, 20 aa, Artificial Sequence
  Synthetically generated peptide
  VARIANT (1)...(20): Xaa = Any Amino Acid
PGTXCGEXICXAYAACTXGC

SEQ ID NO: 1979 - protein, 20 aa, Artificial Sequence
  Synthetically generated peptide
  VARIANT (1)...(20): Xaa = Any Amino Acid
PGTXCGEXICXAYAACTGXC

SEQ ID NO: 1980 - protein, 20 aa, Artificial Sequence
  Synthetically generated peptide
  VARIANT (1)...(20): Xaa = Any Amino Acid
  VARIANT (1)...(20): Xaa = Any Amino Acid
PGTXCGEXICXAYAACTGCX

SEQ ID NO: 1981 - protein, 19 aa, Artificial Sequence
  Synthetically generated peptide
  VARIANT (1)...(19): Xaa = Any Amino Acid
  VARIANT (1)...(19): Xaa = Any Amino Acid
PGTXCGEXICAXYAACTGC

SEQ ID NO: 1982 - protein, 20 aa, Artificial Sequence
  Synthetically generated peptide
  VARIANT (1)...(20): Xaa = Any Amino Acid
  VARIANT (1)...(20): Xaa = Any Amino Acid
PGTXCGEXICAXXYAACTGC

SEQ ID NO: 1983 - protein, 20 aa, Artificial Sequence
  Synthetically generated peptide
  VARIANT (1)...(20): Xaa = Any Amino Acid
  VARIANT (1)...(20): Xaa = Any Amino Acid
PGTXCGEXICAXYXAACTGC

SEQ ID NO: 1984 - protein, 20 aa, Artificial Sequence
  Synthetically generated peptide
  VARIANT (1)...(20): Xaa = Any Amino Acid
  VARIANT (1)...(20): Xaa = Any Amino Acid
PGTXCGEXICAXYAXACTGC

SEQ ID NO: 1985 - protein, 20 aa, Artificial Sequence
  Synthetically generated peptide
  VARIANT (1)...(20): Xaa = Any Amino Acid
  VARIANT (1)...(20): Xaa = Any Amino Acid
PGTXCGEXICAXYAAXCTGC

SEQ ID NO: 1986 - protein, 20 aa, Artificial Sequence
  Synthetically generated peptide
  VARIANT (1)...(20): Xaa = Any Amino Acid
  VARIANT (1)...(20): Xaa = Any Amino Acid
PGTXCGEXICAXYAACXTGC

SEQ ID NO: 1987 - protein, 20 aa, Artificial Sequence
  Synthetically generated peptide
  VARIANT (1)...(20): Xaa = Any Amino Acid
  VARIANT (1)...(20): Xaa = Any Amino Acid
PGTXCGEXICAXYAACTXGC

SEQ ID NO: 1988 - protein, 20 aa, Artificial Sequence
  Synthetically generated peptide
  VARIANT (1)...(20): Xaa = Any Amino Acid
  VARIANT (1)...(20): Xaa = Any Amino Acid
PGTXCGEXICAXYAACTGXC

SEQ ID NO: 1989 - protein, 20 aa, Artificial Sequence
  Synthetically generated peptide
  VARIANT (1)...(20): Xaa = Any Amino Acid
  VARIANT (1)...(20): Xaa = Any Amino Acid
PGTXCGEXICAXYAACTGCX

SEQ ID NO: 1990 - protein, 19 aa, Artificial Sequence
  Synthetically generated peptide
  VARIANT (1)...(19): Xaa = Any Amino Acid
  VARIANT (1)...(19): Xaa = Any Amino Acid
PGTXCGEXICAYXAACTGC

SEQ ID NO: 1991 - protein, 20 aa, Artificial Sequence
  Synthetically generated peptide
  VARIANT (1)...(20): Xaa = Any Amino Acid
  VARIANT (1)...(20): Xaa = Any Amino Acid
PGTXCGEXICAYXXAACTGC

SEQ ID NO: 1992 - protein, 20 aa, Artificial Sequence
  Synthetically generated peptide
  VARIANT (1)...(20): Xaa = Any Amino Acid
  VARIANT (1)...(20): Xaa = Any Amino Acid
PGTXCGEXICAYXAXACTGC

SEQ ID NO: 1993 - protein, 20 aa, Artificial Sequence
  Synthetically generated peptide
  VARIANT (1)...(20): Xaa = Any Amino Acid
  VARIANT (1)...(20): Xaa = Any Amino Acid
PGTXCGEXICAYXAAXCTGC

SEQ ID NO: 1994 - protein, 20 aa, Artificial Sequence
  Synthetically generated peptide
  VARIANT (1)...(20): Xaa = Any Amino Acid
  VARIANT (1)...(20): Xaa = Any Amino Acid
PGTXCGEXICAYXAACXTGC

SEQ ID NO: 1995 - protein, 20 aa, Artificial Sequence
  Synthetically generated peptide
  VARIANT (1)...(20): Xaa = Any Amino Acid
  VARIANT (1)...(20): Xaa = Any Amino Acid
PGTXCGEXICAYXAACTXGC

SEQ ID NO: 1996 - protein, 20 aa, Artificial Sequence
  Synthetically generated peptide
  VARIANT (1)...(20): Xaa = Any Amino Acid
  VARIANT (1)...(20): Xaa = Any Amino Acid
PGTXCGEXICAYXAACTGXC

SEQ ID NO: 1997 - protein, 20 aa, Artificial Sequence
  Synthetically generated peptide
  VARIANT (1)...(20): Xaa = Any Amino Acid
  VARIANT (1)...(20): Xaa = Any Amino Acid
PGTXCGEXICAYXAACTGCX

SEQ ID NO: 1998 - protein, 19 aa, Artificial Sequence
  Synthetically generated peptide
  VARIANT (1)...(19): Xaa = Any Amino Acid
  VARIANT (1)...(19): Xaa = Any Amino Acid
PGTXCGEXICAYAXACTGC

SEQ ID NO: 1999 - protein, 20 aa, Artificial Sequence
  Synthetically generated peptide
  VARIANT (1)...(20): Xaa = Any Amino Acid
  VARIANT (1)...(20): Xaa = Any Amino Acid
PGTXCGEXICAYAXXACTGC

SEQ ID NO: 2000 - protein, 20 aa, Artificial Sequence
  Synthetically generated peptide
  VARIANT (1)...(20): Xaa = Any Amino Acid
  VARIANT (1)...(20): Xaa = Any Amino Acid
PGTXCGEXICAYAXAXCTGC

SEQ ID NO: 2001 - protein, 20 aa, Artificial Sequence
  Synthetically generated peptide
  VARIANT (1)...(20): Xaa = Any Amino Acid
  VARIANT (1)...(20): Xaa = Any Amino Acid
PGTXCGEXICAYAXACXTGC

SEQ ID NO: 2002 - protein, 20 aa, Artificial Sequence
  Synthetically generated peptide
  VARIANT (1)...(20): Xaa = Any Amino Acid
  VARIANT (1)...(20): Xaa = Any Amino Acid
PGTXCGEXICAYAXACTXGC

SEQ ID NO: 2003 - protein, 20 aa, Artificial Sequence
  Synthetically generated peptide
  VARIANT (1)...(20): Xaa = Any Amino Acid
  VARIANT (1)...(20): Xaa = Any Amino Acid
PGTXCGEXICAYAXACTGXC

SEQ ID NO: 2004 - protein, 20 aa, Artificial Sequence
  Synthetically generated peptide
  VARIANT (1)...(20): Xaa = Any Amino Acid
  VARIANT (1)...(20): Xaa = Any Amino Acid
PGTXCGEXICAYAXACTGCX

SEQ ID NO: 2005 - protein, 19 aa, Artificial Sequence
  Synthetically generated peptide
  VARIANT (1)...(19): Xaa = Any Amino Acid
  VARIANT (1)...(19): Xaa = Any Amino Acid
PGTXCGEXICAYAAXCTGC

SEQ ID NO: 2006 - protein, 20 aa, Artificial Sequence
  Synthetically generated peptide
  VARIANT (1)...(20): Xaa = Any Amino Acid
  VARIANT (1)...(20): Xaa = Any Amino Acid
PGTXCGEXICAYAAXXCTGC

SEQ ID NO: 2007 - protein, 20 aa, Artificial Sequence
  Synthetically generated peptide
  VARIANT (1)...(20): Xaa = Any Amino Acid
  VARIANT (1)...(20): Xaa = Any Amino Acid
PGTXCGEXICAYAAXCXTGC

SEQ ID NO: 2008 - protein, 20 aa, Artificial Sequence
  Synthetically generated peptide
  VARIANT (1)...(20): Xaa = Any Amino Acid
  VARIANT (1)...(20): Xaa = Any Amino Acid
PGTXCGEXICAYAAXCTXGC

SEQ ID NO: 2009 - protein, 20 aa, Artificial Sequence
  Synthetically generated peptide
  VARIANT (1)...(20): Xaa = Any Amino Acid
  VARIANT (1)...(20): Xaa = Any Amino Acid
PGTXCGEXICAYAAXCTGXC

SEQ ID NO: 2010 - protein, 20 aa, Artificial Sequence
  Synthetically generated peptide
  VARIANT (1)...(20): Xaa = Any Amino Acid
  VARIANT (1)...(20): Xaa = Any Amino Acid
PGTXCGEXICAYAAXCTGCX

SEQ ID NO: 2011 - protein, 19 aa, Artificial Sequence
  Synthetically generated peptide
  VARIANT (1)...(19): Xaa = Any Amino Acid
  VARIANT (1)...(19): Xaa = Any Amino Acid
PGTXCGEXICAYAACXTGC

SEQ ID NO: 2012 - protein, 20 aa, Artificial Sequence
  Synthetically generated peptide
  VARIANT (1)...(20): Xaa = Any Amino Acid
  VARIANT (1)...(20): Xaa = Any Amino Acid
PGTXCGEXICAYAACXXTGC

SEQ ID NO: 2013 - protein, 20 aa, Artificial Sequence
  Synthetically generated peptide
  VARIANT (1)...(20): Xaa = Any Amino Acid
  VARIANT (1)...(20): Xaa = Any Amino Acid
PGTXCGEXICAYAACXTXGC

SEQ ID NO: 2014 - protein, 20 aa, Artificial Sequence
  Synthetically generated peptide
  VARIANT (1)...(20): Xaa = Any Amino Acid
PGTXCGEXICAYAACXTGXC

SEQ ID NO: 2015 - protein, 20 aa, Artificial Sequence
  Synthetically generated peptide
  VARIANT (1)...(20): Xaa = Any Amino Acid
PGTXCGEXICAYAACXTGCX

SEQ ID NO: 2016 - protein, 19 aa, Artificial Sequence
  Synthetically generated peptide
  VARIANT (1)...(19): Xaa = Any Amino Acid
  VARIANT (1)...(19): Xaa = Any Amino Acid
PGTXCGEXICAYAACTXGC

SEQ ID NO: 2017 - protein, 20 aa, Artificial Sequence
  Synthetically generated peptide
  VARIANT (1)...(20): Xaa = Any Amino Acid
  VARIANT (1)...(20): Xaa = Any Amino Acid
PGTXCGEXICAYAACTXXGC

SEQ ID NO: 2018 - protein, 20 aa, Artificial Sequence
  Synthetically generated peptide
  VARIANT (1)...(20): Xaa = Any Amino Acid
  VARIANT (1)...(20): Xaa = Any Amino Acid
PGTXCGEXICAYAACTXGXC

SEQ ID NO: 2019 - protein, 20 aa, Artificial Sequence
  Synthetically generated peptide
  VARIANT (1)...(20): Xaa = Any Amino Acid
  VARIANT (1)...(20): Xaa = Any Amino Acid
PGTXCGEXICAYAACTXGCX

SEQ ID NO: 2020 - protein, 19 aa, Artificial Sequence
  Synthetically generated peptide
  VARIANT (1)...(19): Xaa = Any Amino Acid
  VARIANT (1)...(19): Xaa = Any Amino Acid
PGTXCGEXICAYAACTGXC

SEQ ID NO: 2021 - protein, 20 aa, Artificial Sequence
  Synthetically generated peptide
  VARIANT (1)...(20): Xaa = Any Amino Acid
  VARIANT (1)...(20): Xaa = Any Amino Acid
PGTXCGEXICAYAACTGXXC

SEQ ID NO: 2022 - protein, 20 aa, Artificial Sequence
  Synthetically generated peptide
  VARIANT (1)...(20): Xaa = Any Amino Acid
  VARIANT (1)...(20): Xaa = Any Amino Acid
PGTXCGEXICAYAACTGXCX

SEQ ID NO: 2023 - protein, 19 aa, Artificial Sequence
  Synthetically generated peptide
  VARIANT (1)...(19): Xaa = Any Amino Acid
  VARIANT (1)...(19): Xaa = Any Amino Acid
PGTXCGEXICAYAACTGCX

SEQ ID NO: 2024 - protein, 20 aa, Artificial Sequence
  Synthetically generated peptide
  VARIANT (1)...(20): Xaa = Any Amino Acid
  VARIANT (1)...(20): Xaa = Any Amino Acid
PGTXCGEXICAYAACTGCXX

SEQ ID NO: 2025 - protein, 18 aa, Artificial Sequence
  Synthetically generated peptide
  VARIANT (1)...(18): Xaa = Any Amino Acid
  VARIANT (1)...(18): Xaa = Any Amino Acid
PGTXCGEIXCAYAACTGC

SEQ ID NO: 2026 - protein, 19 aa, Artificial Sequence
  Synthetically generated peptide
  VARIANT (1)...(19): Xaa = Any Amino Acid
  VARIANT (1)...(19): Xaa = Any Amino Acid
PGTXCGEIXXCAYAACTGC

SEQ ID NO: 2027 - protein, 20 aa, Artificial Sequence
  Synthetically generated peptide
  VARIANT (1)...(20): Xaa = Any Amino Acid
  VARIANT (1)...(20): Xaa = Any Amino Acid
PGTXCGEIXXXCAYAACTGC

SEQ ID NO: 2028 - protein, 20 aa, Artificial Sequence
  Synthetically generated peptide
  VARIANT (1)...(20): Xaa = Any Amino Acid
  VARIANT (1)...(20): Xaa = Any Amino Acid
PGTXCGEIXXCXAYAACTGC

SEQ ID NO: 2029 - protein, 20 aa, Artificial Sequence
  Synthetically generated peptide
  VARIANT (1)...(20): Xaa = Any Amino Acid
  VARIANT (1)...(20): Xaa = Any Amino Acid
PGTXCGEIXXCAXYAACTGC

SEQ ID NO: 2030 - protein, 20 aa, Artificial Sequence
  Synthetically generated peptide
  VARIANT (1)...(20): Xaa = Any Amino Acid
  VARIANT (1)...(20): Xaa = Any Amino Acid
PGTXCGEIXXCAYXAACTGC

SEQ ID NO: 2031 - protein, 20 aa, Artificial Sequence
  Synthetically generated peptide
  VARIANT (1)...(20): Xaa = Any Amino Acid
  VARIANT (1)...(20): Xaa = Any Amino Acid
PGTXCGEIXXCAYAXACTGC

SEQ ID NO: 2032 - protein, 20 aa, Artificial Sequence
  Synthetically generated peptide
  VARIANT (1)...(20): Xaa = Any Amino Acid
  VARIANT (1)...(20): Xaa = Any Amino Acid
PGTXCGEIXXCAYAAXCTGC

SEQ ID NO: 2033 - protein, 20 aa, Artificial Sequence
  Synthetically generated peptide
  VARIANT (1)...(20): Xaa = Any Amino Acid
  VARIANT (1)...(20): Xaa = Any Amino Acid
PGTXCGEIXXCAYAACXTGC

SEQ ID NO: 2034 - protein, 20 aa, Artificial Sequence
  Synthetically generated peptide
  VARIANT (1)...(20): Xaa = Any Amino Acid
  VARIANT (1)...(20): Xaa = Any Amino Acid
PGTXCGEIXXCAYAACTXGC

SEQ ID NO: 2035 - protein, 20 aa, Artificial Sequence
  Synthetically generated peptide
  VARIANT (1)...(20): Xaa = Any Amino Acid
  VARIANT (1)...(20): Xaa = Any Amino Acid
PGTXCGEIXXCAYAACTGXC

SEQ ID NO: 2036 - protein, 20 aa, Artificial Sequence
  Synthetically generated peptide
  VARIANT (1)...(20): Xaa = Any Amino Acid
  VARIANT (1)...(20): Xaa = Any Amino Acid
PGTXCGEIXXCAYAACTGCX

SEQ ID NO: 2037 - protein, 19 aa, Artificial Sequence
  Synthetically generated peptide
  VARIANT (1)...(19): Xaa = Any Amino Acid
  VARIANT (1)...(19): Xaa = Any Amino Acid
PGTXCGEIXCXAYAACTGC

SEQ ID NO: 2038 - protein, 20 aa, Artificial Sequence
  Synthetically generated peptide
  VARIANT (1)...(20): Xaa = Any Amino Acid
  VARIANT (1)...(20): Xaa = Any Amino Acid
PGTXCGEIXCXXAYAACTGC

SEQ ID NO: 2039 - protein, 20 aa, Artificial Sequence
  Synthetically generated peptide
  VARIANT (1)...(20): Xaa = Any Amino Acid
  VARIANT (1)...(20): Xaa = Any Amino Acid
PGTXCGEIXCXAXYAACTGC

SEQ ID NO: 2040 - protein, 20 aa, Artificial Sequence
  Synthetically generated peptide
  VARIANT (1)...(20): Xaa = Any Amino Acid
  VARIANT (1)...(20): Xaa = Any Amino Acid
PGTXCGEIXCXAYXAACTGC

SEQ ID NO: 2041 - protein, 20 aa, Artificial Sequence
  Synthetically generated peptide
  VARIANT (1)...(20): Xaa = Any Amino Acid
  VARIANT (1)...(20): Xaa = Any Amino Acid
PGTXCGEIXCXAYAXACTGC

SEQ ID NO: 2042 - protein, 20 aa, Artificial Sequence
  Synthetically generated peptide
  VARIANT (1)...(20): Xaa = Any Amino Acid
  VARIANT (1)...(20): Xaa = Any Amino Acid
PGTXCGEIXCXAYAAXCTGC

SEQ ID NO: 2043 - protein, 20 aa, Artificial Sequence
  Synthetically generated peptide
  VARIANT (1)...(20): Xaa = Any Amino Acid
  VARIANT (1)...(20): Xaa = Any Amino Acid
PGTXCGEIXCXAYAACXTGC

SEQ ID NO: 2044 - protein, 20 aa, Artificial Sequence
  Synthetically generated peptide
  VARIANT (1)...(20): Xaa = Any Amino Acid
  VARIANT (1)...(20): Xaa = Any Amino Acid
PGTXCGEIXCXAYAACTXGC

SEQ ID NO: 2045 - protein, 20 aa, Artificial Sequence
  Synthetically generated peptide
  VARIANT (1)...(20): Xaa = Any Amino Acid
  VARIANT (1)...(20): Xaa = Any Amino Acid
PGTXCGEIXCXAYAACTGXC

SEQ ID NO: 2046 - protein, 20 aa, Artificial Sequence
  Synthetically generated peptide
  VARIANT (1)...(20): Xaa = Any Amino Acid
  VARIANT (1)...(20): Xaa = Any Amino Acid
PGTXCGEIXCXAYAACTGCX

SEQ ID NO: 2047 - protein, 19 aa, Artificial Sequence
  Synthetically generated peptide
  VARIANT (1)...(19): Xaa = Any Amino Acid
  VARIANT (1)...(19): Xaa = Any Amino Acid
PGTXCGEIXCAXYAACTGC

SEQ ID NO: 2048 - protein, 20 aa, Artificial Sequence
  Synthetically generated peptide
  VARIANT (1)...(20): Xaa = Any Amino Acid
  VARIANT (1)...(20): Xaa = Any Amino Acid
PGTXCGEIXCAXXYAACTGC

SEQ ID NO: 2049 - protein, 20 aa, Artificial Sequence
  Synthetically generated peptide
  VARIANT (1)...(20): Xaa = Any Amino Acid
  VARIANT (1)...(20): Xaa = Any Amino Acid
PGTXCGEIXCAXYXAACTGC

SEQ ID NO: 2050 - protein, 20 aa, Artificial Sequence
  Synthetically generated peptide
  VARIANT (1)...(20): Xaa = Any Amino Acid
  VARIANT (1)...(20): Xaa = Any Amino Acid
PGTXCGEIXCAXYAXACTGC

SEQ ID NO: 2051 - protein, 20 aa, Artificial Sequence
  Synthetically generated peptide
  VARIANT (1)...(20): Xaa = Any Amino Acid
  VARIANT (1)...(20): Xaa = Any Amino Acid
PGTXCGEIXCAXYAAXCTGC

SEQ ID NO: 2052 - protein, 20 aa, Artificial Sequence
  Synthetically generated peptide
  VARIANT (1)...(20): Xaa = Any Amino Acid
  VARIANT (1)...(20): Xaa = Any Amino Acid
PGTXCGEIXCAXYAACXTGC

SEQ ID NO: 2053 - protein, 20 aa, Artificial Sequence
  Synthetically generated peptide
  VARIANT (1)...(20): Xaa = Any Amino Acid
  VARIANT (1)...(20): Xaa = Any Amino Acid
PGTXCGEIXCAXYAACTXGC

SEQ ID NO: 2054 - protein, 20 aa, Artificial Sequence
  Synthetically generated peptide
  VARIANT (1)...(20): Xaa = Any Amino Acid
  VARIANT (1)...(20): Xaa = Any Amino Acid
PGTXCGEIXCAXYAACTGXC

SEQ ID NO: 2055 - protein, 20 aa, Artificial Sequence
  Synthetically generated peptide
  VARIANT (1)...(20): Xaa = Any Amino Acid
  VARIANT (1)...(20): Xaa = Any Amino Acid
PGTXCGEIXCAXYAACTGCX

SEQ ID NO: 2056 - protein, 19 aa, Artificial Sequence
  Synthetically generated peptide
  VARIANT (1)...(19): Xaa = Any Amino Acid
  VARIANT (1)...(19): Xaa = Any Amino Acid
PGTXCGEIXCAYXAACTGC

SEQ ID NO: 2057 - protein, 20 aa, Artificial Sequence
  Synthetically generated peptide
  VARIANT (1)...(20): Xaa = Any Amino Acid
  VARIANT (1)...(20): Xaa = Any Amino Acid
PGTXCGEIXCAYXXAACTGC

SEQ ID NO: 2058 - protein, 20 aa, Artificial Sequence
  Synthetically generated peptide
  VARIANT (1)...(20): Xaa = Any Amino Acid
  VARIANT (1)...(20): Xaa = Any Amino Acid
PGTXCGEIXCAYXAXACTGC

SEQ ID NO: 2059 - protein, 20 aa, Artificial Sequence
  Synthetically generated peptide
  VARIANT (1)...(20): Xaa = Any Amino Acid
  VARIANT (1)...(20): Xaa = Any Amino Acid
PGTXCGEIXCAYXAAXCTGC

SEQ ID NO: 2060 - protein, 20 aa, Artificial Sequence
  Synthetically generated peptide
  VARIANT (1)...(20): Xaa = Any Amino Acid
  VARIANT (1)...(20): Xaa = Any Amino Acid
PGTXCGEIXCAYXAACXTGC

SEQ ID NO: 2061 - protein, 20 aa, Artificial Sequence
  Synthetically generated peptide
  VARIANT (1)...(20): Xaa = Any Amino Acid
  VARIANT (1)...(20): Xaa = Any Amino Acid
PGTXCGEIXCAYXAACTXGC

SEQ ID NO: 2062 - protein, 20 aa, Artificial Sequence
  Synthetically generated peptide
  VARIANT (1)...(20): Xaa = Any Amino Acid
  VARIANT (1)...(20): Xaa = Any Amino Acid
PGTXCGEIXCAYXAACTGXC

SEQ ID NO: 2063 - protein, 20 aa, Artificial Sequence
  Synthetically generated peptide
  VARIANT (1)...(20): Xaa = Any Amino Acid
  VARIANT (1)...(20): Xaa = Any Amino Acid
PGTXCGEIXCAYXAACTGCX

SEQ ID NO: 2064 - protein, 19 aa, Artificial Sequence
  Synthetically generated peptide
  VARIANT (1)...(19): Xaa = Any Amino Acid
  VARIANT (1)...(19): Xaa = Any Amino Acid
PGTXCGEIXCAYAXACTGC

SEQ ID NO: 2065 - protein, 20 aa, Artificial Sequence
  Synthetically generated peptide
  VARIANT (1)...(20): Xaa = Any Amino Acid
  VARIANT (1)...(20): Xaa = Any Amino Acid
PGTXCGEIXCAYAXXACTGC

SEQ ID NO: 2066 - protein, 20 aa, Artificial Sequence
  Synthetically generated peptide
  VARIANT (1)...(20): Xaa = Any Amino Acid
  VARIANT (1)...(20): Xaa = Any Amino Acid
PGTXCGEIXCAYAXAXCTGC

SEQ ID NO: 2067 - protein, 20 aa, Artificial Sequence
  Synthetically generated peptide
  VARIANT (1)...(20): Xaa = Any Amino Acid
  VARIANT (1)...(20): Xaa = Any Amino Acid
PGTXCGEIXCAYAXACXTGC

SEQ ID NO: 2068 - protein, 20 aa, Artificial Sequence
  Synthetically generated peptide
  VARIANT (1)...(20): Xaa = Any Amino Acid
  VARIANT (1)...(20): Xaa = Any Amino Acid
PGTXCGEIXCAYAXACTXGC

SEQ ID NO: 2069 - protein, 20 aa, Artificial Sequence
  Synthetically generated peptide
  VARIANT (1)...(20): Xaa = Any Amino Acid
PGTXCGEIXCAYAXACTGXC

SEQ ID NO: 2070 - protein, 20 aa, Artificial Sequence
  Synthetically generated peptide
  VARIANT (1)...(20): Xaa = Any Amino Acid
PGTXCGEIXCAYAXACTGCX

SEQ ID NO: 2071 - protein, 19 aa, Artificial Sequence
  Synthetically generated peptide
  VARIANT (1)...(19): Xaa = Any Amino Acid
PGTXCGEIXCAYAAXCTGC

SEQ ID NO: 2072 - protein, 20 aa, Artificial Sequence
  Synthetically generated peptide
  VARIANT (1)...(20): Xaa = Any Amino Acid
PGTXCGEIXCAYAAXXCTGC

SEQ ID NO: 2073 - protein, 20 aa, Artificial Sequence
  Synthetically generated peptide
  VARIANT (1)...(20): Xaa = Any Amino Acid
PGTXCGEIXCAYAAXCXTGC

SEQ ID NO: 2074 - protein, 20 aa, Artificial Sequence
  Synthetically generated peptide
  VARIANT (1)...(20): Xaa = Any Amino Acid
PGTXCGEIXCAYAAXCTXGC

SEQ ID NO: 2075 - protein, 20 aa, Artificial Sequence
  Synthetically generated peptide
  VARIANT (1)...(20): Xaa = Any Amino Acid
PGTXCGEIXCAYAAXCTGXC

SEQ ID NO: 2076 - protein, 20 aa, Artificial Sequence
  Synthetically generated peptide
  VARIANT (1)...(20): Xaa = Any Amino Acid
PGTXCGEIXCAYAAXCTGCX

SEQ ID NO: 2077 - protein, 19 aa, Artificial Sequence
  Synthetically generated peptide
  VARIANT (1)...(19): Xaa = Any Amino Acid
PGTXCGEIXCAYAACXTGC

SEQ ID NO: 2078 - protein, 20 aa, Artificial Sequence
  Synthetically generated peptide
  VARIANT (1)...(20): Xaa = Any Amino Acid
PGTXCGEIXCAYAACXXTGC

SEQ ID NO: 2079 - protein, 20 aa, Artificial Sequence
  Synthetically generated peptide
  VARIANT (1)...(20): Xaa = Any Amino Acid
PGTXCGEIXCAYAACXTXGC

SEQ ID NO: 2080 - protein, 20 aa, Artificial Sequence
  Synthetically generated peptide
  VARIANT (1)...(20): Xaa = Any Amino Acid
PGTXCGEIXCAYAACXTGXC

SEQ ID NO: 2081 - protein, 20 aa, Artificial Sequence
  Synthetically generated peptide
  VARIANT (1)...(20): Xaa = Any Amino Acid
PGTXCGEIXCAYAACXTGCX

SEQ ID NO: 2082 - protein, 19 aa, Artificial Sequence
  Synthetically generated peptide
  VARIANT (1)...(19): Xaa = Any Amino Acid
PGTXCGEIXCAYAACTXGC

SEQ ID NO: 2083 - protein, 20 aa, Artificial Sequence
  Synthetically generated peptide
  VARIANT (1)...(20): Xaa = Any Amino Acid
PGTXCGEIXCAYAACTXXGC

SEQ ID NO: 2084 - protein, 20 aa, Artificial Sequence
  Synthetically generated peptide
  VARIANT (1)...(20): Xaa = Any Amino Acid
PGTXCGEIXCAYAACTXGXC

SEQ ID NO: 2085 - protein, 20 aa, Artificial Sequence
  Synthetically generated peptide
  VARIANT (1)...(20): Xaa = Any Amino Acid
PGTXCGEIXCAYAACTXGCX

SEQ ID NO: 2086 - protein, 19 aa, Artificial Sequence
  Synthetically generated peptide
  VARIANT (1)...(19): Xaa = Any Amino Acid
PGTXCGEIXCAYAACTGXC

SEQ ID NO: 2087 - protein, 20 aa, Artificial Sequence
  Synthetically generated peptide
  VARIANT (1)...(20): Xaa = Any Amino Acid
PGTXCGEIXCAYAACTGXXC

SEQ ID NO: 2088 - protein, 20 aa, Artificial Sequence
  Synthetically generated peptide
  VARIANT (1)...(20): Xaa = Any Amino Acid
PGTXCGEIXCAYAACTGXCX

SEQ ID NO: 2089 - protein, 19 aa, Artificial Sequence
  Synthetically generated peptide
  VARIANT (1)...(19): Xaa = Any Amino Acid
PGTXCGEIXCAYAACTGCX

SEQ ID NO: 2090 - protein, 20 aa, Artificial Sequence
  Synthetically generated peptide
  VARIANT (1)...(20): Xaa = Any Amino Acid
PGTXCGEIXCAYAACTGCXX

SEQ ID NO: 2091 - protein, 18 aa, Artificial Sequence
  Synthetically generated peptide
  VARIANT (1)...(18): Xaa = Any Amino Acid
PGTXCGEICXAYAACTGC

SEQ ID NO: 2092 - protein, 19 aa, Artificial Sequence
  Synthetically generated peptide
  VARIANT (1)...(19): Xaa = Any Amino Acid
PGTXCGEICXXAYAACTGC

SEQ ID NO: 2093 - protein, 20 aa, Artificial Sequence
  Synthetically generated peptide
  VARIANT (1)...(20): Xaa = Any Amino Acid
PGTXCGEICXXXAYAACTGC

SEQ ID NO: 2094 - protein, 20 aa, Artificial Sequence
  Synthetically generated peptide
  VARIANT (1)...(20): Xaa = Any Amino Acid
PGTXCGEICXXAXYAACTGC

SEQ ID NO: 2095 - protein, 20 aa, Artificial Sequence
  Synthetically generated peptide
  VARIANT (1)...(20): Xaa = Any Amino Acid
PGTXCGEICXXAYXAACTGC

SEQ ID NO: 2096 - protein, 20 aa, Artificial Sequence
  Synthetically generated peptide
  VARIANT (1)...(20): Xaa = Any Amino Acid
PGTXCGEICXXAYAXACTGC

SEQ ID NO: 2097 - protein, 20 aa, Artificial Sequence
  Synthetically generated peptide
  VARIANT (1)...(20): Xaa = Any Amino Acid
PGTXCGEICXXAYAAXCTGC

SEQ ID NO: 2098 - protein, 20 aa, Artificial Sequence
  Synthetically generated peptide
  VARIANT (1)...(20): Xaa = Any Amino Acid
PGTXCGEICXXAYAACXTGC

SEQ ID NO: 2099 - protein, 20 aa, Artificial Sequence
  Synthetically generated peptide
  VARIANT (1)...(20): Xaa = Any Amino Acid
PGTXCGEICXXAYAACTXGC

SEQ ID NO: 2100 - protein, 20 aa, Artificial Sequence
  Synthetically generated peptide
  VARIANT (1)...(20): Xaa = Any Amino Acid
PGTXCGEICXXAYAACTGXC

SEQ ID NO: 2101 - protein, 20 aa, Artificial Sequence
  Synthetically generated peptide
  VARIANT (1)...(20): Xaa = Any Amino Acid
PGTXCGEICXXAYAACTGCX

SEQ ID NO: 2102 - protein, 19 aa, Artificial Sequence
  Synthetically generated peptide
  VARIANT (1)...(19): Xaa = Any Amino Acid
PGTXCGEICXAXYAACTGC

SEQ ID NO: 2103 - protein, 20 aa, Artificial Sequence
  Synthetically generated peptide
  VARIANT (1)...(20): Xaa = Any Amino Acid
PGTXCGEICXAXXYAACTGC

SEQ ID NO: 2104 - protein, 20 aa, Artificial Sequence
  Synthetically generated peptide
  VARIANT (1)...(20): Xaa = Any Amino Acid
PGTXCGEICXAXYXAACTGC

SEQ ID NO: 2105 - protein, 20 aa, Artificial Sequence
  Synthetically generated peptide
  VARIANT (1)...(20): Xaa = Any Amino Acid
PGTXCGEICXAXYAXACTGC

SEQ ID NO: 2106 - protein, 20 aa, Artificial Sequence
  Synthetically generated peptide
  VARIANT (1)...(20): Xaa = Any Amino Acid
PGTXCGEICXAXYAAXCTGC

SEQ ID NO: 2107 - protein, 20 aa, Artificial Sequence
  Synthetically generated peptide
  VARIANT (1)...(20): Xaa = Any Amino Acid
PGTXCGEICXAXYAACXTGC

SEQ ID NO: 2108 - protein, 20 aa, Artificial Sequence
  Synthetically generated peptide
  VARIANT (1)...(20): Xaa = Any Amino Acid
PGTXCGEICXAXYAACTXGC

SEQ ID NO: 2109 - protein, 20 aa, Artificial Sequence
  Synthetically generated peptide
  VARIANT (1)...(20): Xaa = Any Amino Acid
PGTXCGEICXAXYAACTGXC

SEQ ID NO: 2110 - protein, 20 aa, Artificial Sequence
  Synthetically generated peptide
  VARIANT (1)...(20): Xaa = Any Amino Acid
PGTXCGEICXAXYAACTGCX

SEQ ID NO: 2111 - protein, 19 aa, Artificial Sequence
  Synthetically generated peptide
  VARIANT (1)...(19): Xaa = Any Amino Acid
PGTXCGEICXAYXAACTGC

SEQ ID NO: 2112 - protein, 20 aa, Artificial Sequence
  Synthetically generated peptide
  VARIANT (1)...(20): Xaa = Any Amino Acid
PGTXCGEICXAYXXAACTGC

SEQ ID NO: 2113 - protein, 20 aa, Artificial Sequence
  Synthetically generated peptide
  VARIANT (1)...(20): Xaa = Any Amino Acid
PGTXCGEICXAYXAXACTGC

SEQ ID NO: 2114 - protein, 20 aa, Artificial Sequence
  Synthetically generated peptide
  VARIANT (1)...(20): Xaa = Any Amino Acid
PGTXCGEICXAYXAAXCTGC

SEQ ID NO: 2115 - protein, 20 aa, Artificial Sequence
  Synthetically generated peptide
  VARIANT (1)...(20): Xaa = Any Amino Acid
PGTXCGEICXAYXAACXTGC

SEQ ID NO: 2116 - protein, 20 aa, Artificial Sequence
  Synthetically generated peptide
  VARIANT (1)...(20): Xaa = Any Amino Acid
PGTXCGEICXAYXAACTXGC

SEQ ID NO: 2117 - protein, 20 aa, Artificial Sequence
  Synthetically generated peptide
  VARIANT (1)...(20): Xaa = Any Amino Acid
PGTXCGEICXAYXAACTGXC

SEQ ID NO: 2118 - protein, 20 aa, Artificial Sequence
  Synthetically generated peptide
  VARIANT (1)...(20): Xaa = Any Amino Acid
PGTXCGEICXAYXAACTGCX

SEQ ID NO: 2119 - protein, 19 aa, Artificial Sequence
  Synthetically generated peptide
  VARIANT (1)...(19): Xaa = Any Amino Acid
PGTXCGEICXAYAXACTGC

SEQ ID NO: 2120 - protein, 20 aa, Artificial Sequence
  Synthetically generated peptide
  VARIANT (1)...(20): Xaa = Any Amino Acid
PGTXCGEICXAYAXXACTGC

SEQ ID NO: 2121 - protein, 20 aa, Artificial Sequence
  Synthetically generated peptide
  VARIANT (1)...(20): Xaa = Any Amino Acid
PGTXCGEICXAYAXAXCTGC

SEQ ID NO: 2122 - protein, 20 aa, Artificial Sequence
  Synthetically generated peptide
  VARIANT (1)...(20): Xaa = Any Amino Acid
PGTXCGEICXAYAXACXTGC

SEQ ID NO: 2123 - protein, 20 aa, Artificial Sequence
  Synthetically generated peptide
  VARIANT (1)...(20): Xaa = Any Amino Acid
PGTXCGEICXAYAXACTXGC

SEQ ID NO: 2124 - protein, 20 aa, Artificial Sequence
  Synthetically generated peptide
  VARIANT (1)...(20): Xaa = Any Amino Acid
PGTXCGEICXAYAXACTGXC

SEQ ID NO: 2125 - protein, 20 aa, Artificial Sequence
  Synthetically generated peptide
  VARIANT (1)...(20): Xaa = Any Amino Acid
PGTXCGEICXAYAXACTGCX

SEQ ID NO: 2126 - protein, 19 aa, Artificial Sequence
  Synthetically generated peptide
  VARIANT (1)...(19): Xaa = Any Amino Acid
PGTXCGEICXAYAAXCTGC

SEQ ID NO: 2127 - protein, 20 aa, Artificial Sequence
  Synthetically generated peptide
  VARIANT (1)...(20): Xaa = Any Amino Acid
PGTXCGEICXAYAAXXCTGC

SEQ ID NO: 2128 - protein, 20 aa, Artificial Sequence
  Synthetically generated peptide
  VARIANT (1)...(20): Xaa = Any Amino Acid
PGTXCGEICXAYAAXCXTGC

SEQ ID NO: 2129 - protein, 20 aa, Artificial Sequence
  Synthetically generated peptide
  VARIANT (1)...(20): Xaa = Any Amino Acid
PGTXCGEICXAYAAXCTXGC

SEQ ID NO: 2130 - protein, 20 aa, Artificial Sequence
  Synthetically generated peptide
  VARIANT (1)...(20): Xaa = Any Amino Acid
PGTXCGEICXAYAAXCTGXC

SEQ ID NO: 2131 - protein, 20 aa, Artificial Sequence
  Synthetically generated peptide
  VARIANT (1)...(20): Xaa = Any Amino Acid
PGTXCGEICXAYAAXCTGCX

SEQ ID NO: 2132 - protein, 19 aa, Artificial Sequence
  Synthetically generated peptide
  VARIANT (1)...(19): Xaa = Any Amino Acid
PGTXCGEICXAYAACXTGC

SEQ ID NO: 2133 - protein, 20 aa, Artificial Sequence
  Synthetically generated peptide
  VARIANT (1)...(20): Xaa = Any Amino Acid
PGTXCGEICXAYAACXXTGC

SEQ ID NO: 2134 - protein, 20 aa, Artificial Sequence
  Synthetically generated peptide
  VARIANT (1)...(20): Xaa = Any Amino Acid
PGTXCGEICXAYAACXTXGC

SEQ ID NO: 2135 - protein, 20 aa, Artificial Sequence
  Synthetically generated peptide
  VARIANT (1)...(20): Xaa = Any Amino Acid
PGTXCGEICXAYAACXTGXC

SEQ ID NO: 2136 - protein, 20 aa, Artificial Sequence
  Synthetically generated peptide
  VARIANT (1)...(20): Xaa = Any Amino Acid
PGTXCGEICXAYAACXTGCX

SEQ ID NO: 2137 - protein, 19 aa, Artificial Sequence
  Synthetically generated peptide
  VARIANT (1)...(19): Xaa = Any Amino Acid
PGTXCGEICXAYAACTXGC

SEQ ID NO: 2138 - protein, 20 aa, Artificial Sequence
  Synthetically generated peptide
  VARIANT (1)...(20): Xaa = Any Amino Acid
PGTXCGEICXAYAACTXXGC

SEQ ID NO: 2139 - protein, 20 aa, Artificial Sequence
  Synthetically generated peptide
  VARIANT (1)...(20): Xaa = Any Amino Acid
PGTXCGEICXAYAACTXGXC

SEQ ID NO: 2140 - protein, 20 aa, Artificial Sequence
  Synthetically generated peptide
  VARIANT (1)...(20): Xaa = Any Amino Acid
PGTXCGEICXAYAACTXGCX

SEQ ID NO: 2141 - protein, 19 aa, Artificial Sequence
  Synthetically generated peptide
  VARIANT (1)...(19): Xaa = Any Amino Acid
PGTXCGEICXAYAACTGXC

SEQ ID NO: 2142 - protein, 20 aa, Artificial Sequence
  Synthetically generated peptide
  VARIANT (1)...(20): Xaa = Any Amino Acid
PGTXCGEICXAYAACTGXXC

SEQ ID NO: 2143 - protein, 20 aa, Artificial Sequence
  Synthetically generated peptide
  VARIANT (1)...(20): Xaa = Any Amino Acid
PGTXCGEICXAYAACTGXCX

SEQ ID NO: 2144 - protein, 19 aa, Artificial Sequence
  Synthetically generated peptide
  VARIANT (1)...(19): Xaa = Any Amino Acid
PGTXCGEICXAYAACTGCX

SEQ ID NO: 2145 - protein, 20 aa, Artificial Sequence
  Synthetically generated peptide
  VARIANT (1)...(20): Xaa = Any Amino Acid
PGTXCGEICXAYAACTGCXX

SEQ ID NO: 2146 - protein, 18 aa, Artificial Sequence
  Synthetically generated peptide
  VARIANT (1)...(18): Xaa = Any Amino Acid
PGTXCGEICAXYAACTGC

SEQ ID NO: 2147 - protein, 19 aa, Artificial Sequence
  Synthetically generated peptide
  VARIANT (1)...(19): Xaa = Any Amino Acid
PGTXCGEICAXXYAACTGC

SEQ ID NO: 2148 - protein, 20 aa, Artificial Sequence
  Synthetically generated peptide
  VARIANT (1)...(20): Xaa = Any Amino Acid
PGTXCGEICAXXXYAACTGC

SEQ ID NO: 2149 - protein, 20 aa, Artificial Sequence
  Synthetically generated peptide
  VARIANT (1)...(20): Xaa = Any Amino Acid
PGTXCGEICAXXYXAACTGC

SEQ ID NO: 2150 - protein, 20 aa, Artificial Sequence
  Synthetically generated peptide
  VARIANT (1)...(20): Xaa = Any Amino Acid
PGTXCGEICAXXYAXACTGC

SEQ ID NO: 2151 - protein, 20 aa, Artificial Sequence
  Synthetically generated peptide
  VARIANT (1)...(20): Xaa = Any Amino Acid
PGTXCGEICAXXYAAXCTGC

SEQ ID NO: 2152 - protein, 20 aa, Artificial Sequence
  Synthetically generated peptide
  VARIANT (1)...(20): Xaa = Any Amino Acid
PGTXCGEICAXXYAACXTGC

SEQ ID NO: 2153 - protein, 20 aa, Artificial Sequence
  Synthetically generated peptide
  VARIANT (1)...(20): Xaa = Any Amino Acid
PGTXCGEICAXXYAACTXGC

SEQ ID NO: 2154 - protein, 20 aa, Artificial Sequence
  Synthetically generated peptide
  VARIANT (1)...(20): Xaa = Any Amino Acid
PGTXCGEICAXXYAACTGXC

SEQ ID NO: 2155 - protein, 20 aa, Artificial Sequence
  Synthetically generated peptide
  VARIANT (1)...(20): Xaa = Any Amino Acid
PGTXCGEICAXXYAACTGCX

SEQ ID NO: 2156 - protein, 19 aa, Artificial Sequence
  Synthetically generated peptide
  VARIANT (1)...(19): Xaa = Any Amino Acid
PGTXCGEICAXYXAACTGC

SEQ ID NO: 2157 - protein, 20 aa, Artificial Sequence
  Synthetically generated peptide
  VARIANT (1)...(20): Xaa = Any Amino Acid
PGTXCGEICAXYXXAACTGC

SEQ ID NO: 2158 - protein, 20 aa, Artificial Sequence
  Synthetically generated peptide
  VARIANT (1)...(20): Xaa = Any Amino Acid
PGTXCGEICAXYXAXACTGC

SEQ ID NO: 2159 - protein, 20 aa, Artificial Sequence
  Synthetically generated peptide
  VARIANT (1)...(20): Xaa = Any Amino Acid
PGTXCGEICAXYXAAXCTGC

SEQ ID NO: 2160 - protein, 20 aa, Artificial Sequence
  Synthetically generated peptide
  VARIANT (1)...(20): Xaa = Any Amino Acid
PGTXCGEICAXYXAACXTGC

SEQ ID NO: 2161 - protein, 20 aa, Artificial Sequence
  Synthetically generated peptide
  VARIANT (1)...(20): Xaa = Any Amino Acid
PGTXCGEICAXYXAACTXGC

SEQ ID NO: 2162 - protein, 20 aa, Artificial Sequence
  Synthetically generated peptide
  VARIANT (1)...(20): Xaa = Any Amino Acid
PGTXCGEICAXYXAACTGXC

SEQ ID NO: 2163 - protein, 20 aa, Artificial Sequence
  Synthetically generated peptide
  VARIANT (1)...(20): Xaa = Any Amino Acid
PGTXCGEICAXYXAACTGCX

SEQ ID NO: 2164 - protein, 19 aa, Artificial Sequence
  Synthetically generated peptide
  VARIANT (1)...(19): Xaa = Any Amino Acid
PGTXCGEICAXYAXACTGC

SEQ ID NO: 2165 - protein, 20 aa, Artificial Sequence
  Synthetically generated peptide
  VARIANT (1)...(20): Xaa = Any Amino Acid
PGTXCGEICAXYAXXACTGC

SEQ ID NO: 2166 - protein, 20 aa, Artificial Sequence
  Synthetically generated peptide
  VARIANT (1)...(20): Xaa = Any Amino Acid
PGTXCGEICAXYAXAXCTGC

SEQ ID NO: 2167 - protein, 20 aa, Artificial Sequence
  Synthetically generated peptide
  VARIANT (1)...(20): Xaa = Any Amino Acid
PGTXCGEICAXYAXACXTGC

SEQ ID NO: 2168 - protein, 20 aa, Artificial Sequence
  Synthetically generated peptide
  VARIANT (1)...(20): Xaa = Any Amino Acid
PGTXCGEICAXYAXACTXGC

SEQ ID NO: 2169 - protein, 20 aa, Artificial Sequence
  Synthetically generated peptide
  VARIANT (1)...(20): Xaa = Any Amino Acid
PGTXCGEICAXYAXACTGXC

SEQ ID NO: 2170 - protein, 20 aa, Artificial Sequence
  Synthetically generated peptide
  VARIANT (1)...(20): Xaa = Any Amino Acid
PGTXCGEICAXYAXACTGCX

SEQ ID NO: 2171 - protein, 19 aa, Artificial Sequence
  Synthetically generated peptide
  VARIANT (1)...(19): Xaa = Any Amino Acid
PGTXCGEICAXYAAXCTGC

SEQ ID NO: 2172 - protein, 20 aa, Artificial Sequence
  Synthetically generated peptide
  VARIANT (1)...(20): Xaa = Any Amino Acid
PGTXCGEICAXYAAXXCTGC

SEQ ID NO: 2173 - protein, 20 aa, Artificial Sequence
  Synthetically generated peptide
  VARIANT (1)...(20): Xaa = Any Amino Acid
PGTXCGEICAXYAAXCXTGC

SEQ ID NO: 2174 - protein, 20 aa, Artificial Sequence
  Synthetically generated peptide
  VARIANT (1)...(20): Xaa = Any Amino Acid
PGTXCGEICAXYAAXCTXGC

SEQ ID NO: 2175 - protein, 20 aa, Artificial Sequence
  Synthetically generated peptide
  VARIANT (1)...(20): Xaa = Any Amino Acid
PGTXCGEICAXYAAXCTGXC

SEQ ID NO: 2176 - protein, 20 aa, Artificial Sequence
  Synthetically generated peptide
  VARIANT (1)...(20): Xaa = Any Amino Acid
PGTXCGEICAXYAAXCTGCX

SEQ ID NO: 2177 - protein, 19 aa, Artificial Sequence
  Synthetically generated peptide
  VARIANT (1)...(19): Xaa = Any Amino Acid
PGTXCGEICAXYAACXTGC

SEQ ID NO: 2178 - protein, 20 aa, Artificial Sequence
  Synthetically generated peptide
  VARIANT (1)...(20): Xaa = Any Amino Acid
PGTXCGEICAXYAACXXTGC

SEQ ID NO: 2179 - protein, 20 aa, Artificial Sequence
  Synthetically generated peptide
  VARIANT (1)...(20): Xaa = Any Amino Acid
PGTXCGEICAXYAACXTXGC

SEQ ID NO: 2180 - protein, 20 aa, Artificial Sequence
  Synthetically generated peptide
  VARIANT (1)...(20): Xaa = Any Amino Acid
PGTXCGEICAXYAACXTGXC

SEQ ID NO: 2181 - protein, 20 aa, Artificial Sequence
  Synthetically generated peptide
  VARIANT (1)...(20): Xaa = Any Amino Acid
PGTXCGEICAXYAACXTGCX

SEQ ID NO: 2182 - protein, 19 aa, Artificial Sequence
  Synthetically generated peptide
  VARIANT (1)...(19): Xaa = Any Amino Acid
PGTXCGEICAXYAACTXGC

SEQ ID NO: 2183 - protein, 20 aa, Artificial Sequence
  Synthetically generated peptide
  VARIANT (1)...(20): Xaa = Any Amino Acid
PGTXCGEICAXYAACTXXGC

SEQ ID NO: 2184 - protein, 20 aa, Artificial Sequence
  Synthetically generated peptide
  VARIANT (1)...(20): Xaa = Any Amino Acid
PGTXCGEICAXYAACTXGXC

SEQ ID NO: 2185 - protein, 20 aa, Artificial Sequence
  Synthetically generated peptide
  VARIANT (1)...(20): Xaa = Any Amino Acid
PGTXCGEICAXYAACTXGCX

SEQ ID NO: 2186 - protein, 19 aa, Artificial Sequence
  Synthetically generated peptide
  VARIANT (1)...(19): Xaa = Any Amino Acid
PGTXCGEICAXYAACTGXC

SEQ ID NO: 2187 - protein, 20 aa, Artificial Sequence
  Synthetically generated peptide
  VARIANT (1)...(20): Xaa = Any Amino Acid
PGTXCGEICAXYAACTGXXC

SEQ ID NO: 2188 - protein, 20 aa, Artificial Sequence
  Synthetically generated peptide
  VARIANT (1)...(20): Xaa = Any Amino Acid
PGTXCGEICAXYAACTGXCX

SEQ ID NO: 2189 - protein, 19 aa, Artificial Sequence
  Synthetically generated peptide
  VARIANT (1)...(19): Xaa = Any Amino Acid
PGTXCGEICAXYAACTGCX

SEQ ID NO: 2190 - protein, 20 aa, Artificial Sequence
  Synthetically generated peptide
  VARIANT (1)...(20): Xaa = Any Amino Acid
PGTXCGEICAXYAACTGCXX

SEQ ID NO: 2191 - protein, 18 aa, Artificial Sequence
  Synthetically generated peptide
  VARIANT (1)...(18): Xaa = Any Amino Acid
PGTXCGEICAYXAACTGC

SEQ ID NO: 2192 - protein, 19 aa, Artificial Sequence
  Synthetically generated peptide
  VARIANT (1)...(19): Xaa = Any Amino Acid
PGTXCGEICAYXXAACTGC

SEQ ID NO: 2193 - protein, 20 aa, Artificial Sequence
  Synthetically generated peptide
  VARIANT (1)...(20): Xaa = Any Amino Acid
PGTXCGEICAYXXXAACTGC

SEQ ID NO: 2194 - protein, 20 aa, Artificial Sequence
  Synthetically generated peptide
  VARIANT (1)...(20): Xaa = Any Amino Acid
PGTXCGEICAYXXAXACTGC

SEQ ID NO: 2195 - protein, 20 aa, Artificial Sequence
  Synthetically generated peptide
  VARIANT (1)...(20): Xaa = Any Amino Acid
PGTXCGEICAYXXAAXCTGC

SEQ ID NO: 2196 - protein, 20 aa, Artificial Sequence
  Synthetically generated peptide
  VARIANT (1)...(20): Xaa = Any Amino Acid
PGTXCGEICAYXXAACXTGC

SEQ ID NO: 2197 - protein, 20 aa, Artificial Sequence
  Synthetically generated peptide
  VARIANT (1)...(20): Xaa = Any Amino Acid
PGTXCGEICAYXXAACTXGC

SEQ ID NO: 2198 - protein, 20 aa, Artificial Sequence
  Synthetically generated peptide
  VARIANT (1)...(20): Xaa = Any Amino Acid
PGTXCGEICAYXXAACTGXC

SEQ ID NO: 2199 - protein, 20 aa, Artificial Sequence
  Synthetically generated peptide
  VARIANT (1)...(20): Xaa = Any Amino Acid
PGTXCGEICAYXXAACTGCX

SEQ ID NO: 2200 - protein, 19 aa, Artificial Sequence
  Synthetically generated peptide
  VARIANT (1)...(19): Xaa = Any Amino Acid
PGTXCGEICAYXAXACTGC

SEQ ID NO: 2201 - protein, 20 aa, Artificial Sequence
  Synthetically generated peptide
  VARIANT (1)...(20): Xaa = Any Amino Acid
PGTXCGEICAYXAXXACTGC

SEQ ID NO: 2202 - protein, 20 aa, Artificial Sequence
  Synthetically generated peptide
  VARIANT (1)...(20): Xaa = Any Amino Acid
PGTXCGEICAYXAXAXCTGC

SEQ ID NO: 2203 - protein, 20 aa, Artificial Sequence
  Synthetically generated peptide
  VARIANT (1)...(20): Xaa = Any Amino Acid
PGTXCGEICAYXAXACXTGC

SEQ ID NO: 2204 - protein, 20 aa, Artificial Sequence
  Synthetically generated peptide
  VARIANT (1)...(20): Xaa = Any Amino Acid
PGTXCGEICAYXAXACTXGC

SEQ ID NO: 2205 - protein, 20 aa, Artificial Sequence
  Synthetically generated peptide
  VARIANT (1)...(20): Xaa = Any Amino Acid
PGTXCGEICAYXAXACTGXC

SEQ ID NO: 2206 - protein, 20 aa, Artificial Sequence
  Synthetically generated peptide
  VARIANT (1)...(20): Xaa = Any Amino Acid
PGTXCGEICAYXAXACTGCX

SEQ ID NO: 2207 - protein, 19 aa, Artificial Sequence
  Synthetically generated peptide
  VARIANT (1)...(19): Xaa = Any Amino Acid
PGTXCGEICAYXAAXCTGC

SEQ ID NO: 2208 - protein, 20 aa, Artificial Sequence
  Synthetically generated peptide
  VARIANT (1)...(20): Xaa = Any Amino Acid
PGTXCGEICAYXAAXXCTGC

SEQ ID NO: 2209 - protein, 20 aa, Artificial Sequence
  Synthetically generated peptide
  VARIANT (1)...(20): Xaa = Any Amino Acid
PGTXCGEICAYXAAXCXTGC

SEQ ID NO: 2210 - protein, 20 aa, Artificial Sequence
  Synthetically generated peptide
  VARIANT (1)...(20): Xaa = Any Amino Acid
PGTXCGEICAYXAAXCTXGC

SEQ ID NO: 2211 - protein, 20 aa, Artificial Sequence
  Synthetically generated peptide
  VARIANT (1)...(20): Xaa = Any Amino Acid
PGTXCGEICAYXAAXCTGXC

SEQ ID NO: 2212 - protein, 20 aa, Artificial Sequence
  Synthetically generated peptide
  VARIANT (1)...(20): Xaa = Any Amino Acid
PGTXCGEICAYXAAXCTGCX

SEQ ID NO: 2213 - protein, 19 aa, Artificial Sequence
  Synthetically generated peptide
  VARIANT (1)...(19): Xaa = Any Amino Acid
PGTXCGEICAYXAACXTGC

SEQ ID NO: 2214 - protein, 20 aa, Artificial Sequence
  Synthetically generated peptide
  VARIANT (1)...(20): Xaa = Any Amino Acid
PGTXCGEICAYXAACXXTGC

SEQ ID NO: 2215 - protein, 20 aa, Artificial Sequence
  Synthetically generated peptide
  VARIANT (1)...(20): Xaa = Any Amino Acid
PGTXCGEICAYXAACXTXGC

SEQ ID NO: 2216 - protein, 20 aa, Artificial Sequence
  Synthetically generated peptide
  VARIANT (1)...(20): Xaa = Any Amino Acid
PGTXCGEICAYXAACXTGXC

SEQ ID NO: 2217 - protein, 20 aa, Artificial Sequence
  Synthetically generated peptide
  VARIANT (1)...(20): Xaa = Any Amino Acid
PGTXCGEICAYXAACXTGCX

SEQ ID NO: 2218 - protein, 19 aa, Artificial Sequence
  Synthetically generated peptide
  VARIANT (1)...(19): Xaa = Any Amino Acid
PGTXCGEICAYXAACTXGC

SEQ ID NO: 2219 - protein, 20 aa, Artificial Sequence
  Synthetically generated peptide
  VARIANT (1)...(20): Xaa = Any Amino Acid
PGTXCGEICAYXAACTXXGC

SEQ ID NO: 2220 - protein, 20 aa, Artificial Sequence
  Synthetically generated peptide
  VARIANT (1)...(20): Xaa = Any Amino Acid
PGTXCGEICAYXAACTXGXC

SEQ ID NO: 2221 - protein, 20 aa, Artificial Sequence
  Synthetically generated peptide
  VARIANT (1)...(20): Xaa = Any Amino Acid
PGTXCGEICAYXAACTXGCX

SEQ ID NO: 2222 - protein, 19 aa, Artificial Sequence
  Synthetically generated peptide
  VARIANT (1)...(19): Xaa = Any Amino Acid
PGTXCGEICAYXAACTGXC

SEQ ID NO: 2223 - protein, 20 aa, Artificial Sequence
  Synthetically generated peptide
  VARIANT (1)...(20): Xaa = Any Amino Acid
PGTXCGEICAYXAACTGXXC

SEQ ID NO: 2224 - protein, 20 aa, Artificial Sequence
  Synthetically generated peptide
  VARIANT (1)...(20): Xaa = Any Amino Acid
PGTXCGEICAYXAACTGXCX

SEQ ID NO: 2225 - protein, 19 aa, Artificial Sequence
  Synthetically generated peptide
  VARIANT (1)...(19): Xaa = Any Amino Acid
PGTXCGEICAYXAACTGCX

SEQ ID NO: 2226 - protein, 20 aa, Artificial Sequence
  Synthetically generated peptide
  VARIANT (1)...(20): Xaa = Any Amino Acid
PGTXCGEICAYXAACTGCXX

SEQ ID NO: 2227 - protein, 18 aa, Artificial Sequence
  Synthetically generated peptide
  VARIANT (1)...(18): Xaa = Any Amino Acid
PGTXCGEICAYAXACTGC

SEQ ID NO: 2228 - protein, 19 aa, Artificial Sequence
  Synthetically generated peptide
  VARIANT (1)...(19): Xaa = Any Amino Acid
PGTXCGEICAYAXXACTGC

SEQ ID NO: 2229 - protein, 20 aa, Artificial Sequence
  Synthetically generated peptide
  VARIANT (1)...(20): Xaa = Any Amino Acid
PGTXCGEICAYAXXXACTGC

SEQ ID NO: 2230 - protein, 20 aa, Artificial Sequence
  Synthetically generated peptide
  VARIANT (1)...(20): Xaa = Any Amino Acid
PGTXCGEICAYAXXAXCTGC

SEQ ID NO: 2231 - protein, 20 aa, Artificial Sequence
  Synthetically generated peptide
  VARIANT (1)...(20): Xaa = Any Amino Acid
PGTXCGEICAYAXXACXTGC

SEQ ID NO: 2232 - protein, 20 aa, Artificial Sequence
  Synthetically generated peptide
  VARIANT (1)...(20): Xaa = Any Amino Acid
PGTXCGEICAYAXXACTXGC

SEQ ID NO: 2233 - protein, 20 aa, Artificial Sequence
  Synthetically generated peptide
  VARIANT (1)...(20): Xaa = Any Amino Acid
PGTXCGEICAYAXXACTGXC

SEQ ID NO: 2234 - protein, 20 aa, Artificial Sequence
  Synthetically generated peptide
  VARIANT (1)...(20): Xaa = Any Amino Acid
PGTXCGEICAYAXXACTGCX

SEQ ID NO: 2235 - protein, 19 aa, Artificial Sequence
  Synthetically generated peptide
  VARIANT (1)...(19): Xaa = Any Amino Acid
PGTXCGEICAYAXAXCTGC

SEQ ID NO: 2236 - protein, 20 aa, Artificial Sequence
  Synthetically generated peptide
  VARIANT (1)...(20): Xaa = Any Amino Acid
PGTXCGEICAYAXAXXCTGC

SEQ ID NO: 2237 - protein, 20 aa, Artificial Sequence
  Synthetically generated peptide
  VARIANT (1)...(20): Xaa = Any Amino Acid
PGTXCGEICAYAXAXCXTGC

SEQ ID NO: 2238 - protein, 20 aa, Artificial Sequence
  Synthetically generated peptide
  VARIANT (1)...(20): Xaa = Any Amino Acid
PGTXCGEICAYAXAXCTXGC

SEQ ID NO: 2239 - protein, 20 aa, Artificial Sequence
  Synthetically generated peptide
  VARIANT (1)...(20): Xaa = Any Amino Acid
PGTXCGEICAYAXAXCTGXC

SEQ ID NO: 2240 - protein, 20 aa, Artificial Sequence
  Synthetically generated peptide
  VARIANT (1)...(20): Xaa = Any Amino Acid
PGTXCGEICAYAXAXCTGCX

SEQ ID NO: 2241 - protein, 19 aa, Artificial Sequence
  Synthetically generated peptide
  VARIANT (1)...(19): Xaa = Any Amino Acid
PGTXCGEICAYAXACXTGC

SEQ ID NO: 2242 - protein, 20 aa, Artificial Sequence
  Synthetically generated peptide
  VARIANT (1)...(20): Xaa = Any Amino Acid
PGTXCGEICAYAXACXXTGC

SEQ ID NO: 2243 - protein, 20 aa, Artificial Sequence
  Synthetically generated peptide
  VARIANT (1)...(20): Xaa = Any Amino Acid
PGTXCGEICAYAXACXTXGC

SEQ ID NO: 2244 - protein, 20 aa, Artificial Sequence
  Synthetically generated peptide
  VARIANT (1)...(20): Xaa = Any Amino Acid
PGTXCGEICAYAXACXTGXC

SEQ ID NO: 2245 - protein, 20 aa, Artificial Sequence
  Synthetically generated peptide
  VARIANT (1)...(20): Xaa = Any Amino Acid
PGTXCGEICAYAXACXTGCX

SEQ ID NO: 2246 - protein, 19 aa, Artificial Sequence
  Synthetically generated peptide
  VARIANT (1)...(19): Xaa = Any Amino Acid
PGTXCGEICAYAXACTXGC

SEQ ID NO: 2247 - protein, 20 aa, Artificial Sequence
  Synthetically generated peptide
  VARIANT (1)...(20): Xaa = Any Amino Acid
PGTXCGEICAYAXACTXXGC

SEQ ID NO: 2248 - protein, 20 aa, Artificial Sequence
  Synthetically generated peptide
  VARIANT (1)...(20): Xaa = Any Amino Acid
PGTXCGEICAYAXACTXGXC

SEQ ID NO: 2249 - protein, 20 aa, Artificial Sequence
  Synthetically generated peptide
  VARIANT (1)...(20): Xaa = Any Amino Acid
PGTXCGEICAYAXACTXGCX

SEQ ID NO: 2250 - protein, 19 aa, Artificial Sequence
  Synthetically generated peptide
  VARIANT (1)...(19): Xaa = Any Amino Acid
PGTXCGEICAYAXACTGXC

SEQ ID NO: 2251 - protein, 20 aa, Artificial Sequence
  Synthetically generated peptide
  VARIANT (1)...(20): Xaa = Any Amino Acid
PGTXCGEICAYAXACTGXXC

SEQ ID NO: 2252 - protein, 20 aa, Artificial Sequence
  Synthetically generated peptide
  VARIANT (1)...(20): Xaa = Any Amino Acid
PGTXCGEICAYAXACTGXCX

SEQ ID NO: 2253 - protein, 19 aa, Artificial Sequence
  Synthetically generated peptide
  VARIANT (1)...(19): Xaa = Any Amino Acid
PGTXCGEICAYAXACTGCX

SEQ ID NO: 2254 - protein, 20 aa, Artificial Sequence
  Synthetically generated peptide
  VARIANT (1)...(20): Xaa = Any Amino Acid
PGTXCGEICAYAXACTGCXX

SEQ ID NO: 2255 - protein, 18 aa, Artificial Sequence
  Synthetically generated peptide
  VARIANT (1)...(18): Xaa = Any Amino Acid
PGTXCGEICAYAAXCTGC

SEQ ID NO: 2256 - protein, 19 aa, Artificial Sequence
  Synthetically generated peptide
  VARIANT (1)...(19): Xaa = Any Amino Acid
PGTXCGEICAYAAXXCTGC

SEQ ID NO: 2257 - protein, 20 aa, Artificial Sequence
  Synthetically generated peptide
  VARIANT (1)...(20): Xaa = Any Amino Acid
PGTXCGEICAYAAXXXCTGC

SEQ ID NO: 2258 - protein, 20 aa, Artificial Sequence
  Synthetically generated peptide
  VARIANT (1)...(20): Xaa = Any Amino Acid
PGTXCGEICAYAAXXCXTGC

SEQ ID NO: 2259 - protein, 20 aa, Artificial Sequence
  Synthetically generated peptide
  VARIANT (1)...(20): Xaa = Any Amino Acid
PGTXCGEICAYAAXXCTXGC

SEQ ID NO: 2260 - protein, 20 aa, Artificial Sequence
  Synthetically generated peptide
  VARIANT (1)...(20): Xaa = Any Amino Acid
PGTXCGEICAYAAXXCTGXC

SEQ ID NO: 2261 - protein, 20 aa, Artificial Sequence
  Synthetically generated peptide
  VARIANT (1)...(20): Xaa = Any Amino Acid
PGTXCGEICAYAAXXCTGCX

SEQ ID NO: 2262 - protein, 19 aa, Artificial Sequence
  Synthetically generated peptide
  VARIANT (1)...(19): Xaa = Any Amino Acid
PGTXCGEICAYAAXCXTGC

SEQ ID NO: 2263 - protein, 20 aa, Artificial Sequence
  Synthetically generated peptide
  VARIANT (1)...(20): Xaa = Any Amino Acid
PGTXCGEICAYAAXCXXTGC

SEQ ID NO: 2264 - protein, 20 aa, Artificial Sequence
  Synthetically generated peptide
  VARIANT (1)...(20): Xaa = Any Amino Acid
PGTXCGEICAYAAXCXTXGC

SEQ ID NO: 2265 - protein, 20 aa, Artificial Sequence
  Synthetically generated peptide
  VARIANT (1)...(20): Xaa = Any Amino Acid
PGTXCGEICAYAAXCXTGXC

SEQ ID NO: 2266 - protein, 20 aa, Artificial Sequence
  Synthetically generated peptide
  VARIANT (1)...(20): Xaa = Any Amino Acid
PGTXCGEICAYAAXCXTGCX

SEQ ID NO: 2267 - protein, 19 aa, Artificial Sequence
  Synthetically generated peptide
  VARIANT (1)...(19): Xaa = Any Amino Acid
PGTXCGEICAYAAXCTXGC

SEQ ID NO: 2268 - protein, 20 aa, Artificial Sequence
  Synthetically generated peptide
  VARIANT (1)...(20): Xaa = Any Amino Acid
PGTXCGEICAYAAXCTXXGC

SEQ ID NO: 2269 - protein, 20 aa, Artificial Sequence
  Synthetically generated peptide
  VARIANT (1)...(20): Xaa = Any Amino Acid
PGTXCGEICAYAAXCTXGXC

SEQ ID NO: 2270 - protein, 20 aa, Artificial Sequence
  Synthetically generated peptide
  VARIANT (1)...(20): Xaa = Any Amino Acid
PGTXCGEICAYAAXCTXGCX

SEQ ID NO: 2271 - protein, 19 aa, Artificial Sequence
  Synthetically generated peptide
  VARIANT (1)...(19): Xaa = Any Amino Acid
PGTXCGEICAYAAXCTGXC

SEQ ID NO: 2272 - protein, 20 aa, Artificial Sequence
  Synthetically generated peptide
  VARIANT (1)...(20): Xaa = Any Amino Acid
PGTXCGEICAYAAXCTGXXC

SEQ ID NO: 2273 - protein, 20 aa, Artificial Sequence
  Synthetically generated peptide
  VARIANT (1)...(20): Xaa = Any Amino Acid
PGTXCGEICAYAAXCTGXCX

SEQ ID NO: 2274 - protein, 19 aa, Artificial Sequence
  Synthetically generated peptide
  VARIANT (1)...(19): Xaa = Any Amino Acid
PGTXCGEICAYAAXCTGCX

SEQ ID NO: 2275 - protein, 20 aa, Artificial Sequence
  Synthetically generated peptide
  VARIANT (1)...(20): Xaa = Any Amino Acid
PGTXCGEICAYAAXCTGCXX

SEQ ID NO: 2276 - protein, 18 aa, Artificial Sequence
  Synthetically generated peptide
  VARIANT (1)...(18): Xaa = Any Amino Acid
PGTXCGEICAYAACXTGC

SEQ ID NO: 2277 - protein, 19 aa, Artificial Sequence
  Synthetically generated peptide
  VARIANT (1)...(19): Xaa = Any Amino Acid
PGTXCGEICAYAACXXTGC

SEQ ID NO: 2278 - protein, 20 aa, Artificial Sequence
  Synthetically generated peptide
  VARIANT (1)...(20): Xaa = Any Amino Acid
PGTXCGEICAYAACXXXTGC

SEQ ID NO: 2279 - protein, 20 aa, Artificial Sequence
  Synthetically generated peptide
  VARIANT (1)...(20): Xaa = Any Amino Acid
PGTXCGEICAYAACXXTXGC

SEQ ID NO: 2280 - protein, 20 aa, Artificial Sequence
  Synthetically generated peptide
  VARIANT (1)...(20): Xaa = Any Amino Acid
PGTXCGEICAYAACXXTGXC

SEQ ID NO: 2281 - protein, 20 aa, Artificial Sequence
  Synthetically generated peptide
  VARIANT (1)...(20): Xaa = Any Amino Acid
PGTXCGEICAYAACXXTGCX

SEQ ID NO: 2282 - protein, 19 aa, Artificial Sequence
  Synthetically generated peptide
  VARIANT (1)...(19): Xaa = Any Amino Acid
PGTXCGEICAYAACXTXGC

SEQ ID NO: 2283 - protein, 20 aa, Artificial Sequence
  Synthetically generated peptide
  VARIANT (1)...(20): Xaa = Any Amino Acid
PGTXCGEICAYAACXTXXGC

SEQ ID NO: 2284 - protein, 20 aa, Artificial Sequence
  Synthetically generated peptide
  VARIANT (1)...(20): Xaa = Any Amino Acid
PGTXCGEICAYAACXTXGXC

SEQ ID NO: 2285 - protein, 20 aa, Artificial Sequence
  Synthetically generated peptide
  VARIANT (1)...(20): Xaa = Any Amino Acid
PGTXCGEICAYAACXTXGCX

SEQ ID NO: 2286 - protein, 19 aa, Artificial Sequence
  Synthetically generated peptide
  VARIANT (1)...(19): Xaa = Any Amino Acid
PGTXCGEICAYAACXTGXC

SEQ ID NO: 2287 - protein, 20 aa, Artificial Sequence
  Synthetically generated peptide
  VARIANT (1)...(20): Xaa = Any Amino Acid
PGTXCGEICAYAACXTGXXC

SEQ ID NO: 2288 - protein, 20 aa, Artificial Sequence
  Synthetically generated peptide
  VARIANT (1)...(20): Xaa = Any Amino Acid
PGTXCGEICAYAACXTGXCX

SEQ ID NO: 2289 - protein, 19 aa, Artificial Sequence
  Synthetically generated peptide
  VARIANT (1)...(19): Xaa = Any Amino Acid
PGTXCGEICAYAACXTGCX

SEQ ID NO: 2290 - protein, 20 aa, Artificial Sequence
  Synthetically generated peptide
  VARIANT (1)...(20): Xaa = Any Amino Acid
PGTXCGEICAYAACXTGCXX

SEQ ID NO: 2291 - protein, 18 aa, Artificial Sequence
  Synthetically generated peptide
  VARIANT (1)...(18): Xaa = Any Amino Acid
PGTXCGEICAYAACTXGC

SEQ ID NO: 2292 - protein, 19 aa, Artificial Sequence
  Synthetically generated peptide
  VARIANT (1)...(19): Xaa = Any Amino Acid
PGTXCGEICAYAACTXXGC

SEQ ID NO: 2293 - protein, 20 aa, Artificial Sequence
  Synthetically generated peptide
  VARIANT (1)...(20): Xaa = Any Amino Acid
PGTXCGEICAYAACTXXXGC

SEQ ID NO: 2294 - protein, 20 aa, Artificial Sequence
  Synthetically generated peptide
  VARIANT (1)...(20): Xaa = Any Amino Acid
PGTXCGEICAYAACTXXGXC

SEQ ID NO: 2295 - protein, 20 aa, Artificial Sequence
  Synthetically generated peptide
  VARIANT (1)...(20): Xaa = Any Amino Acid
PGTXCGEICAYAACTXXGCX

SEQ ID NO: 2296 - protein, 19 aa, Artificial Sequence
  Synthetically generated peptide
  VARIANT (1)...(19): Xaa = Any Amino Acid
PGTXCGEICAYAACTXGXC

SEQ ID NO: 2297 - protein, 20 aa, Artificial Sequence
  Synthetically generated peptide
  VARIANT (1)...(20): Xaa = Any Amino Acid
PGTXCGEICAYAACTXGXXC

SEQ ID NO: 2298 - protein, 20 aa, Artificial Sequence
  Synthetically generated peptide
  VARIANT (1)...(20): Xaa = Any Amino Acid
PGTXCGEICAYAACTXGXCX

SEQ ID NO: 2299 - protein, 19 aa, Artificial Sequence
  Synthetically generated peptide
  VARIANT (1)...(19): Xaa = Any Amino Acid
PGTXCGEICAYAACTXGCX

SEQ ID NO: 2300 - protein, 20 aa, Artificial Sequence
  Synthetically generated peptide
  VARIANT (1)...(20): Xaa = Any Amino Acid
PGTXCGEICAYAACTXGCXX

SEQ ID NO: 2301 - protein, 18 aa, Artificial Sequence
  Synthetically generated peptide
  VARIANT (1)...(18): Xaa = Any Amino Acid
PGTXCGEICAYAACTGXC

SEQ ID NO: 2302 - protein, 19 aa, Artificial Sequence
  Synthetically generated peptide
  VARIANT (1)...(19): Xaa = Any Amino Acid
PGTXCGEICAYAACTGXXC

SEQ ID NO: 2303 - protein, 20 aa, Artificial Sequence
  Synthetically generated peptide
  VARIANT (1)...(20): Xaa = Any Amino Acid
PGTXCGEICAYAACTGXXXC

SEQ ID NO: 2304 - protein, 20 aa, Artificial Sequence
  Synthetically generated peptide
  VARIANT (1)...(20): Xaa = Any Amino Acid
PGTXCGEICAYAACTGXXCX

SEQ ID NO: 2305 - protein, 19 aa, Artificial Sequence
  Synthetically generated peptide
  VARIANT (1)...(19): Xaa = Any Amino Acid
PGTXCGEICAYAACTGXCX

SEQ ID NO: 2306 - protein, 20 aa, Artificial Sequence
  Synthetically generated peptide
  VARIANT (1)...(20): Xaa = Any Amino Acid
PGTXCGEICAYAACTGXCXX

SEQ ID NO: 2307 - protein, 18 aa, Artificial Sequence
  Synthetically generated peptide
  VARIANT (1)...(18): Xaa = Any Amino Acid
PGTXCGEICAYAACTGCX

SEQ ID NO: 2308 - protein, 19 aa, Artificial Sequence
  Synthetically generated peptide
  VARIANT (1)...(19): Xaa = Any Amino Acid
PGTXCGEICAYAACTGCXX

SEQ ID NO: 2309 - protein, 20 aa, Artificial Sequence
  Synthetically generated peptide
  VARIANT (1)...(20): Xaa = Any Amino Acid
PGTXCGEICAYAACTGCXXX

SEQ ID NO: 2310 - protein, 17 aa, Artificial Sequence
  Synthetically generated peptide
  VARIANT (1)...(17): Xaa = Any Amino Acid
PGTCXGEICAYAACTGC

SEQ ID NO: 2311 - protein, 18 aa, Artificial Sequence
  Synthetically generated peptide
  VARIANT (1)...(18): Xaa = Any Amino Acid
PGTCXXGEICAYAACTGC

SEQ ID NO: 2312 - protein, 19 aa, Artificial Sequence
  Synthetically generated peptide
  VARIANT (1)...(19): Xaa = Any Amino Acid
PGTCXXXGEICAYAACTGC

SEQ ID NO: 2313 - protein, 20 aa, Artificial Sequence
  Synthetically generated peptide
  VARIANT (1)...(20): Xaa = Any Amino Acid
PGTCXXXXGEICAYAACTGC

SEQ ID NO: 2314 - protein, 20 aa, Artificial Sequence
  Synthetically generated peptide
  VARIANT (1)...(20): Xaa = Any Amino Acid
PGTCXXXGXEICAYAACTGC

SEQ ID NO: 2315 - protein, 20 aa, Artificial Sequence
  Synthetically generated peptide
  VARIANT (1)...(20): Xaa = Any Amino Acid
PGTCXXXGEXICAYAACTGC

SEQ ID NO: 2316 - protein, 20 aa, Artificial Sequence
  Synthetically generated peptide
  VARIANT (1)...(20): Xaa = Any Amino Acid
PGTCXXXGEIXCAYAACTGC

SEQ ID NO: 2317 - protein, 20 aa, Artificial Sequence
  Synthetically generated peptide
  VARIANT (1)...(20): Xaa = Any Amino Acid
PGTCXXXGEICXAYAACTGC

SEQ ID NO: 2318 - protein, 20 aa, Artificial Sequence
  Synthetically generated peptide
  VARIANT (1)...(20): Xaa = Any Amino Acid
PGTCXXXGEICAXYAACTGC

SEQ ID NO: 2319 - protein, 20 aa, Artificial Sequence
  Synthetically generated peptide
  VARIANT (1)...(20): Xaa = Any Amino Acid
PGTCXXXGEICAYXAACTGC

SEQ ID NO: 2320 - protein, 20 aa, Artificial Sequence
  Synthetically generated peptide
  VARIANT (1)...(20): Xaa = Any Amino Acid
PGTCXXXGEICAYAXACTGC

SEQ ID NO: 2321 - protein, 20 aa, Artificial Sequence
  Synthetically generated peptide
  VARIANT (1)...(20): Xaa = Any Amino Acid
PGTCXXXGEICAYAAXCTGC

SEQ ID NO: 2322 - protein, 20 aa, Artificial Sequence
  Synthetically generated peptide
  VARIANT (1)...(20): Xaa = Any Amino Acid
PGTCXXXGEICAYAACXTGC

SEQ ID NO: 2323 - protein, 20 aa, Artificial Sequence
  Synthetically generated peptide
  VARIANT (1)...(20): Xaa = Any Amino Acid
PGTCXXXGEICAYAACTXGC

SEQ ID NO: 2324 - protein, 20 aa, Artificial Sequence
  Synthetically generated peptide
  VARIANT (1)...(20): Xaa = Any Amino Acid
PGTCXXXGEICAYAACTGXC

SEQ ID NO: 2325 - protein, 20 aa, Artificial Sequence
  Synthetically generated peptide
  VARIANT (1)...(20): Xaa = Any Amino Acid
PGTCXXXGEICAYAACTGCX

SEQ ID NO: 2326 - protein, 19 aa, Artificial Sequence
  Synthetically generated peptide
  VARIANT (1)...(19): Xaa = Any Amino Acid
PGTCXXGXEICAYAACTGC

SEQ ID NO: 2327 - protein, 20 aa, Artificial Sequence
  Synthetically generated peptide
  VARIANT (1)...(20): Xaa = Any Amino Acid
PGTCXXGXXEICAYAACTGC

SEQ ID NO: 2328 - protein, 20 aa, Artificial Sequence
  Synthetically generated peptide
  VARIANT (1)...(20): Xaa = Any Amino Acid
PGTCXXGXEXICAYAACTGC

SEQ ID NO: 2329 - protein, 20 aa, Artificial Sequence
  Synthetically generated peptide
  VARIANT (1)...(20): Xaa = Any Amino Acid
PGTCXXGXEIXCAYAACTGC

SEQ ID NO: 2330 - protein, 20 aa, Artificial Sequence
  Synthetically generated peptide
  VARIANT (1)...(20): Xaa = Any Amino Acid
PGTCXXGXEICXAYAACTGC

SEQ ID NO: 2331 - protein, 20 aa, Artificial Sequence
  Synthetically generated peptide
  VARIANT (1)...(20): Xaa = Any Amino Acid
PGTCXXGXEICAXYAACTGC

SEQ ID NO: 2332 - protein, 20 aa, Artificial Sequence
  Synthetically generated peptide
  VARIANT (1)...(20): Xaa = Any Amino Acid
PGTCXXGXEICAYXAACTGC

SEQ ID NO: 2333 - protein, 20 aa, Artificial Sequence
  Synthetically generated peptide
  VARIANT (1)...(20): Xaa = Any Amino Acid
PGTCXXGXEICAYAXACTGC

SEQ ID NO: 2334 - protein, 20 aa, Artificial Sequence
  Synthetically generated peptide
  VARIANT (1)...(20): Xaa = Any Amino Acid
PGTCXXGXEICAYAAXCTGC

SEQ ID NO: 2335 - protein, 20 aa, Artificial Sequence
  Synthetically generated peptide
  VARIANT (1)...(20): Xaa = Any Amino Acid
PGTCXXGXEICAYAACXTGC

SEQ ID NO: 2336 - protein, 20 aa, Artificial Sequence
  Synthetically generated peptide
  VARIANT (1)...(20): Xaa = Any Amino Acid
PGTCXXGXEICAYAACTXGC

SEQ ID NO: 2337 - protein, 20 aa, Artificial Sequence
  Synthetically generated peptide
  VARIANT (1)...(20): Xaa = Any Amino Acid
PGTCXXGXEICAYAACTGXC

SEQ ID NO: 2338 - protein, 20 aa, Artificial Sequence
  Synthetically generated peptide
  VARIANT (1)...(20): Xaa = Any Amino Acid
PGTCXXGXEICAYAACTGCX

SEQ ID NO: 2339 - protein, 19 aa, Artificial Sequence
  Synthetically generated peptide
  VARIANT (1)...(19): Xaa = Any Amino Acid
PGTCXXGEXICAYAACTGC

SEQ ID NO: 2340 - protein, 20 aa, Artificial Sequence
  Synthetically generated peptide
  VARIANT (1)...(20): Xaa = Any Amino Acid
PGTCXXGEXXICAYAACTGC

SEQ ID NO: 2341 - protein, 20 aa, Artificial Sequence
  Synthetically generated peptide
  VARIANT (1)...(20): Xaa = Any Amino Acid
PGTCXXGEXIXCAYAACTGC

SEQ ID NO: 2342 - protein, 20 aa, Artificial Sequence
  Synthetically generated peptide
  VARIANT (1)...(20): Xaa = Any Amino Acid
PGTCXXGEXICXAYAACTGC

SEQ ID NO: 2343 - protein, 20 aa, Artificial Sequence
  Synthetically generated peptide
  VARIANT (1)...(20): Xaa = Any Amino Acid
PGTCXXGEXICAXYAACTGC

SEQ ID NO: 2344 - protein, 20 aa, Artificial Sequence
  Synthetically generated peptide
  VARIANT (1)...(20): Xaa = Any Amino Acid
PGTCXXGEXICAYXAACTGC

SEQ ID NO: 2345 - protein, 20 aa, Artificial Sequence
  Synthetically generated peptide
  VARIANT (1)...(20): Xaa = Any Amino Acid
PGTCXXGEXICAYAXACTGC

SEQ ID NO: 2346 - protein, 20 aa, Artificial Sequence
  Synthetically generated peptide
  VARIANT (1)...(20): Xaa = Any Amino Acid
PGTCXXGEXICAYAAXCTGC

SEQ ID NO: 2347 - protein, 20 aa, Artificial Sequence
  Synthetically generated peptide
  VARIANT (1)...(20): Xaa = Any Amino Acid
PGTCXXGEXICAYAACXTGC

SEQ ID NO: 2348 - protein, 20 aa, Artificial Sequence
  Synthetically generated peptide
  VARIANT (1)...(20): Xaa = Any Amino Acid
PGTCXXGEXICAYAACTXGC

SEQ ID NO: 2349 - protein, 20 aa, Artificial Sequence
  Synthetically generated peptide
  VARIANT (1)...(20): Xaa = Any Amino Acid
PGTCXXGEXICAYAACTGXC

SEQ ID NO: 2350 - protein, 20 aa, Artificial Sequence
  Synthetically generated peptide
  VARIANT (1)...(20): Xaa = Any Amino Acid
PGTCXXGEXICAYAACTGCX

SEQ ID NO: 2351 - protein, 19 aa, Artificial Sequence
  Synthetically generated peptide
  VARIANT (1)...(19): Xaa = Any Amino Acid
PGTCXXGEIXCAYAACTGC

SEQ ID NO: 2352 - protein, 20 aa, Artificial Sequence
  Synthetically generated peptide
  VARIANT (1)...(20): Xaa = Any Amino Acid
PGTCXXGEIXXCAYAACTGC

SEQ ID NO: 2353 - protein, 20 aa, Artificial Sequence
  Synthetically generated peptide
  VARIANT (1)...(20): Xaa = Any Amino Acid
PGTCXXGEIXCXAYAACTGC

SEQ ID NO: 2354 - protein, 20 aa, Artificial Sequence
  Synthetically generated peptide
  VARIANT (1)...(20): Xaa = Any Amino Acid
PGTCXXGEIXCAXYAACTGC

SEQ ID NO: 2355 - protein, 20 aa, Artificial Sequence
  Synthetically generated peptide
  VARIANT (1)...(20): Xaa = Any Amino Acid
PGTCXXGEIXCAYXAACTGC

SEQ ID NO: 2356 - protein, 20 aa, Artificial Sequence
  Synthetically generated peptide
  VARIANT (1)...(20): Xaa = Any Amino Acid
PGTCXXGEIXCAYAXACTGC

SEQ ID NO: 2357 - protein, 20 aa, Artificial Sequence
  Synthetically generated peptide
  VARIANT (1)...(20): Xaa = Any Amino Acid
PGTCXXGEIXCAYAAXCTGC

SEQ ID NO: 2358 - protein, 20 aa, Artificial Sequence
  Synthetically generated peptide
  VARIANT (1)...(20): Xaa = Any Amino Acid
PGTCXXGEIXCAYAACXTGC

SEQ ID NO: 2359 - protein, 20 aa, Artificial Sequence
  Synthetically generated peptide
  VARIANT (1)...(20): Xaa = Any Amino Acid
PGTCXXGEIXCAYAACTXGC

SEQ ID NO: 2360 - protein, 20 aa, Artificial Sequence
  Synthetically generated peptide
  VARIANT (1)...(20): Xaa = Any Amino Acid
PGTCXXGEIXCAYAACTGXC

SEQ ID NO: 2361 - protein, 20 aa, Artificial Sequence
  Synthetically generated peptide
  VARIANT (1)...(20): Xaa = Any Amino Acid
PGTCXXGEIXCAYAACTGCX

SEQ ID NO: 2362 - protein, 19 aa, Artificial Sequence
  Synthetically generated peptide
  VARIANT (1)...(19): Xaa = Any Amino Acid
PGTCXXGEICXAYAACTGC

SEQ ID NO: 2363 - protein, 20 aa, Artificial Sequence
  Synthetically generated peptide
  VARIANT (1)...(20): Xaa = Any Amino Acid
PGTCXXGEICXXAYAACTGC

SEQ ID NO: 2364 - protein, 20 aa, Artificial Sequence
  Synthetically generated peptide
  VARIANT (1)...(20): Xaa = Any Amino Acid
PGTCXXGEICXAXYAACTGC

SEQ ID NO: 2365 - protein, 20 aa, Artificial Sequence
  Synthetically generated peptide
  VARIANT (1)...(20): Xaa = Any Amino Acid
PGTCXXGEICXAYXAACTGC

SEQ ID NO: 2366 - protein, 20 aa, Artificial Sequence
  Synthetically generated peptide
  VARIANT (1)...(20): Xaa = Any Amino Acid
PGTCXXGEICXAYAXACTGC

SEQ ID NO: 2367 - protein, 20 aa, Artificial Sequence
  Synthetically generated peptide
  VARIANT (1)...(20): Xaa = Any Amino Acid
PGTCXXGEICXAYAAXCTGC

SEQ ID NO: 2368 - protein, 20 aa, Artificial Sequence
  Synthetically generated peptide
  VARIANT (1)...(20): Xaa = Any Amino Acid
PGTCXXGEICXAYAACXTGC

SEQ ID NO: 2369 - protein, 20 aa, Artificial Sequence
  Synthetically generated peptide
  VARIANT (1)...(20): Xaa = Any Amino Acid
PGTCXXGEICXAYAACTXGC

SEQ ID NO: 2370 - protein, 20 aa, Artificial Sequence
  Synthetically generated peptide
  VARIANT (1)...(20): Xaa = Any Amino Acid
PGTCXXGEICXAYAACTGXC

SEQ ID NO: 2371 - protein, 20 aa, Artificial Sequence
  Synthetically generated peptide
  VARIANT (1)...(20): Xaa = Any Amino Acid
PGTCXXGEICXAYAACTGCX

SEQ ID NO: 2372 - protein, 19 aa, Artificial Sequence
  Synthetically generated peptide
  VARIANT (1)...(19): Xaa = Any Amino Acid
PGTCXXGEICAXYAACTGC

SEQ ID NO: 2373 - protein, 20 aa, Artificial Sequence
  Synthetically generated peptide
  VARIANT (1)...(20): Xaa = Any Amino Acid
PGTCXXGEICAXXYAACTGC

SEQ ID NO: 2374 - protein, 20 aa, Artificial Sequence
  Synthetically generated peptide
  VARIANT (1)...(20): Xaa = Any Amino Acid
PGTCXXGEICAXYXAACTGC

SEQ ID NO: 2375 - protein, 20 aa, Artificial Sequence
  Synthetically generated peptide
  VARIANT (1)...(20): Xaa = Any Amino Acid
PGTCXXGEICAXYAXACTGC

SEQ ID NO: 2376 - protein, 20 aa, Artificial Sequence
  Synthetically generated peptide
  VARIANT (1)...(20): Xaa = Any Amino Acid
PGTCXXGEICAXYAAXCTGC

SEQ ID NO: 2377 - protein, 20 aa, Artificial Sequence
  Synthetically generated peptide
  VARIANT (1)...(20): Xaa = Any Amino Acid
PGTCXXGEICAXYAACXTGC

SEQ ID NO: 2378 - protein, 20 aa, Artificial Sequence
  Synthetically generated peptide
  VARIANT (1)...(20): Xaa = Any Amino Acid
PGTCXXGEICAXYAACTXGC

SEQ ID NO: 2379 - protein, 20 aa, Artificial Sequence
  Synthetically generated peptide
  VARIANT (1)...(20): Xaa = Any Amino Acid
PGTCXXGEICAXYAACTGXC

SEQ ID NO: 2380 - protein, 20 aa, Artificial Sequence
  Synthetically generated peptide
  VARIANT (1)...(20): Xaa = Any Amino Acid
PGTCXXGEICAXYAACTGCX

SEQ ID NO: 2381 - protein, 19 aa, Artificial Sequence
  Synthetically generated peptide
  VARIANT (1)...(19): Xaa = Any Amino Acid
PGTCXXGEICAYXAACTGC

SEQ ID NO: 2382 - protein, 20 aa, Artificial Sequence
  Synthetically generated peptide
  VARIANT (1)...(20): Xaa = Any Amino Acid
PGTCXXGEICAYXXAACTGC

SEQ ID NO: 2383 - protein, 20 aa, Artificial Sequence
  Synthetically generated peptide
  VARIANT (1)...(20): Xaa = Any Amino Acid
PGTCXXGEICAYXAXACTGC

SEQ ID NO: 2384 - protein, 20 aa, Artificial Sequence
  Synthetically generated peptide
  VARIANT (1)...(20): Xaa = Any Amino Acid
PGTCXXGEICAYXAAXCTGC

SEQ ID NO: 2385 - protein, 20 aa, Artificial Sequence
  Synthetically generated peptide
  VARIANT (1)...(20): Xaa = Any Amino Acid
PGTCXXGEICAYXAACXTGC

SEQ ID NO: 2386 - protein, 20 aa, Artificial Sequence
  Synthetically generated peptide
  VARIANT (1)...(20): Xaa = Any Amino Acid
PGTCXXGEICAYXAACTXGC

SEQ ID NO: 2387 - protein, 20 aa, Artificial Sequence
  Synthetically generated peptide
  VARIANT (1)...(20): Xaa = Any Amino Acid
PGTCXXGEICAYXAACTGXC

SEQ ID NO: 2388 - protein, 20 aa, Artificial Sequence
  Synthetically generated peptide
  VARIANT (1)...(20): Xaa = Any Amino Acid
PGTCXXGEICAYXAACTGCX

SEQ ID NO: 2389 - protein, 19 aa, Artificial Sequence
  Synthetically generated peptide
  VARIANT (1)...(19): Xaa = Any Amino Acid
PGTCXXGEICAYAXACTGC

SEQ ID NO: 2390 - protein, 20 aa, Artificial Sequence
  Synthetically generated peptide
  VARIANT (1)...(20): Xaa = Any Amino Acid
PGTCXXGEICAYAXXACTGC

SEQ ID NO: 2391 - protein, 20 aa, Artificial Sequence
  Synthetically generated peptide
  VARIANT (1)...(20): Xaa = Any Amino Acid
PGTCXXGEICAYAXAXCTGC

SEQ ID NO: 2392 - protein, 20 aa, Artificial Sequence
  Synthetically generated peptide
  VARIANT (1)...(20): Xaa = Any Amino Acid
PGTCXXGEICAYAXACXTGC

SEQ ID NO: 2393 - protein, 20 aa, Artificial Sequence
  Synthetically generated peptide
  VARIANT (1)...(20): Xaa = Any Amino Acid
PGTCXXGEICAYAXACTXGC

SEQ ID NO: 2394 - protein, 20 aa, Artificial Sequence
  Synthetically generated peptide
  VARIANT (1)...(20): Xaa = Any Amino Acid
PGTCXXGEICAYAXACTGXC

SEQ ID NO: 2395 - protein, 20 aa, Artificial Sequence
  Synthetically generated peptide
  VARIANT (1)...(20): Xaa = Any Amino Acid
PGTCXXGEICAYAXACTGCX

SEQ ID NO: 2396 - protein, 19 aa, Artificial Sequence
  Synthetically generated peptide
  VARIANT (1)...(19): Xaa = Any Amino Acid
PGTCXXGEICAYAAXCTGC

SEQ ID NO: 2397 - protein, 20 aa, Artificial Sequence
  Synthetically generated peptide
  VARIANT (1)...(20): Xaa = Any Amino Acid
PGTCXXGEICAYAAXXCTGC

SEQ ID NO: 2398 - protein, 20 aa, Artificial Sequence
  Synthetically generated peptide
  VARIANT (1)...(20): Xaa = Any Amino Acid
PGTCXXGEICAYAAXCXTGC

SEQ ID NO: 2399 - protein, 20 aa, Artificial Sequence
  Synthetically generated peptide
  VARIANT (1)...(20): Xaa = Any Amino Acid
PGTCXXGEICAYAAXCTXGC

SEQ ID NO: 2400 - protein, 20 aa, Artificial Sequence
  Synthetically generated peptide
  VARIANT (1)...(20): Xaa = Any Amino Acid
PGTCXXGEICAYAAXCTGXC

SEQ ID NO: 2401 - protein, 20 aa, Artificial Sequence
  Synthetically generated peptide
  VARIANT (1)...(20): Xaa = Any Amino Acid
PGTCXXGEICAYAAXCTGCX

SEQ ID NO: 2402 - protein, 19 aa, Artificial Sequence
  Synthetically generated peptide
  VARIANT (1)...(19): Xaa = Any Amino Acid
PGTCXXGEICAYAACXTGC

SEQ ID NO: 2403 - protein, 20 aa, Artificial Sequence
  Synthetically generated peptide
  VARIANT (1)...(20): Xaa = Any Amino Acid
PGTCXXGEICAYAACXXTGC

SEQ ID NO: 2404 - protein, 20 aa, Artificial Sequence
  Synthetically generated peptide
  VARIANT (1)...(20): Xaa = Any Amino Acid
PGTCXXGEICAYAACXTXGC

SEQ ID NO: 2405 - protein, 20 aa, Artificial Sequence
  Synthetically generated peptide
  VARIANT (1)...(20): Xaa = Any Amino Acid
PGTCXXGEICAYAACXTGXC

SEQ ID NO: 2406 - protein, 20 aa, Artificial Sequence
  Synthetically generated peptide
  VARIANT (1)...(20): Xaa = Any Amino Acid
PGTCXXGEICAYAACXTGCX

SEQ ID NO: 2407 - protein, 19 aa, Artificial Sequence
  Synthetically generated peptide
  VARIANT (1)...(19): Xaa = Any Amino Acid
PGTCXXGEICAYAACTXGC

SEQ ID NO: 2408 - protein, 20 aa, Artificial Sequence
  Synthetically generated peptide
  VARIANT (1)...(20): Xaa = Any Amino Acid
PGTCXXGEICAYAACTXXGC

SEQ ID NO: 2409 - protein, 20 aa, Artificial Sequence
  Synthetically generated peptide
  VARIANT (1)...(20): Xaa = Any Amino Acid
PGTCXXGEICAYAACTXGXC

SEQ ID NO: 2410 - protein, 20 aa, Artificial Sequence
  Synthetically generated peptide
  VARIANT (1)...(20): Xaa = Any Amino Acid
PGTCXXGEICAYAACTXGCX

SEQ ID NO: 2411 - protein, 19 aa, Artificial Sequence
  Synthetically generated peptide
  VARIANT (1)...(19): Xaa = Any Amino Acid
PGTCXXGEICAYAACTGXC

SEQ ID NO: 2412 - protein, 20 aa, Artificial Sequence
  Synthetically generated peptide
  VARIANT (1)...(20): Xaa = Any Amino Acid
PGTCXXGEICAYAACTGXXC

SEQ ID NO: 2413 - protein, 20 aa, Artificial Sequence
  Synthetically generated peptide
  VARIANT (1)...(20): Xaa = Any Amino Acid
PGTCXXGEICAYAACTGXCX

SEQ ID NO: 2414 - protein, 19 aa, Artificial Sequence
  Synthetically generated peptide
  VARIANT (1)...(19): Xaa = Any Amino Acid
PGTCXXGEICAYAACTGCX

SEQ ID NO: 2415 - protein, 20 aa, Artificial Sequence
  Synthetically generated peptide
  VARIANT (1)...(20): Xaa = Any Amino Acid
PGTCXXGEICAYAACTGCXX

SEQ ID NO: 2416 - protein, 18 aa, Artificial Sequence
  Synthetically generated peptide
  VARIANT (1)...(18): Xaa = Any Amino Acid
PGTCXGXEICAYAACTGC

SEQ ID NO: 2417 - protein, 19 aa, Artificial Sequence
  Synthetically generated peptide
  VARIANT (1)...(19): Xaa = Any Amino Acid
PGTCXGXXEICAYAACTGC

SEQ ID NO: 2418 - protein, 20 aa, Artificial Sequence
  Synthetically generated peptide
  VARIANT (1)...(20): Xaa = Any Amino Acid
PGTCXGXXXEICAYAACTGC

SEQ ID NO: 2419 - protein, 20 aa, Artificial Sequence
  Synthetically generated peptide
  VARIANT (1)...(20): Xaa = Any Amino Acid
PGTCXGXXEXICAYAACTGC

SEQ ID NO: 2420 - protein, 20 aa, Artificial Sequence
  Synthetically generated peptide
  VARIANT (1)...(20): Xaa = Any Amino Acid
PGTCXGXXEIXCAYAACTGC

SEQ ID NO: 2421 - protein, 20 aa, Artificial Sequence
  Synthetically generated peptide
  VARIANT (1)...(20): Xaa = Any Amino Acid
PGTCXGXXEICXAYAACTGC

SEQ ID NO: 2422 - protein, 20 aa, Artificial Sequence
  Synthetically generated peptide
  VARIANT (1)...(20): Xaa = Any Amino Acid
PGTCXGXXEICAXYAACTGC

SEQ ID NO: 2423 - protein, 20 aa, Artificial Sequence
  Synthetically generated peptide
  VARIANT (1)...(20): Xaa = Any Amino Acid
PGTCXGXXEICAYXAACTGC

SEQ ID NO: 2424 - protein, 20 aa, Artificial Sequence
  Synthetically generated peptide
  VARIANT (1)...(20): Xaa = Any Amino Acid
PGTCXGXXEICAYAXACTGC

SEQ ID NO: 2425 - protein, 20 aa, Artificial Sequence
  Synthetically generated peptide
  VARIANT (1)...(20): Xaa = Any Amino Acid
PGTCXGXXEICAYAAXCTGC

SEQ ID NO: 2426 - protein, 20 aa, Artificial Sequence
  Synthetically generated peptide
  VARIANT (1)...(20): Xaa = Any Amino Acid
PGTCXGXXEICAYAACXTGC

SEQ ID NO: 2427 - protein, 20 aa, Artificial Sequence
  Synthetically generated peptide
  VARIANT (1)...(20): Xaa = Any Amino Acid
PGTCXGXXEICAYAACTXGC

SEQ ID NO: 2428 - protein, 20 aa, Artificial Sequence
  Synthetically generated peptide
  VARIANT (1)...(20): Xaa = Any Amino Acid
PGTCXGXXEICAYAACTGXC

SEQ ID NO: 2429 - protein, 20 aa, Artificial Sequence
  Synthetically generated peptide
  VARIANT (1)...(20): Xaa = Any Amino Acid
PGTCXGXXEICAYAACTGCX

SEQ ID NO: 2430 - protein, 19 aa, Artificial Sequence
  Synthetically generated peptide
  VARIANT (1)...(19): Xaa = Any Amino Acid
PGTCXGXEXICAYAACTGC

SEQ ID NO: 2431 - protein, 20 aa, Artificial Sequence
  Synthetically generated peptide
  VARIANT (1)...(20): Xaa = Any Amino Acid
PGTCXGXEXXICAYAACTGC

SEQ ID NO: 2432 - protein, 20 aa, Artificial Sequence
  Synthetically generated peptide
  VARIANT (1)...(20): Xaa = Any Amino Acid
PGTCXGXEXIXCAYAACTGC

SEQ ID NO: 2433 - protein, 20 aa, Artificial Sequence
  Synthetically generated peptide
  VARIANT (1)...(20): Xaa = Any Amino Acid
PGTCXGXEXICXAYAACTGC

SEQ ID NO: 2434 - protein, 20 aa, Artificial Sequence
  Synthetically generated peptide
  VARIANT (1)...(20): Xaa = Any Amino Acid
PGTCXGXEXICAXYAACTGC

SEQ ID NO: 2435 - protein, 20 aa, Artificial Sequence
  Synthetically generated peptide
  VARIANT (1)...(20): Xaa = Any Amino Acid
PGTCXGXEXICAYXAACTGC

SEQ ID NO: 2436 - protein, 20 aa, Artificial Sequence
  Synthetically generated peptide
  VARIANT (1)...(20): Xaa = Any Amino Acid
PGTCXGXEXICAYAXACTGC

SEQ ID NO: 2437 - protein, 20 aa, Artificial Sequence
  Synthetically generated peptide
  VARIANT (1)...(20): Xaa = Any Amino Acid
PGTCXGXEXICAYAAXCTGC

SEQ ID NO: 2438 - protein, 20 aa, Artificial Sequence
  Synthetically generated peptide
  VARIANT (1)...(20): Xaa = Any Amino Acid
PGTCXGXEXICAYAACXTGC

SEQ ID NO: 2439 - protein, 20 aa, Artificial Sequence
  Synthetically generated peptide
  VARIANT (1)...(20): Xaa = Any Amino Acid
PGTCXGXEXICAYAACTXGC

SEQ ID NO: 2440 - protein, 20 aa, Artificial Sequence
  Synthetically generated peptide
  VARIANT (1)...(20): Xaa = Any Amino Acid
PGTCXGXEXICAYAACTGXC

SEQ ID NO: 2441 - protein, 20 aa, Artificial Sequence
  Synthetically generated peptide
  VARIANT (1)...(20): Xaa = Any Amino Acid
PGTCXGXEXICAYAACTGCX

SEQ ID NO: 2442 - protein, 19 aa, Artificial Sequence
  Synthetically generated peptide
  VARIANT (1)...(19): Xaa = Any Amino Acid
PGTCXGXEIXCAYAACTGC

SEQ ID NO: 2443 - protein, 20 aa, Artificial Sequence
  Synthetically generated peptide
  VARIANT (1)...(20): Xaa = Any Amino Acid
PGTCXGXEIXXCAYAACTGC

SEQ ID NO: 2444 - protein, 20 aa, Artificial Sequence
  Synthetically generated peptide
  VARIANT (1)...(20): Xaa = Any Amino Acid
PGTCXGXEIXCXAYAACTGC

SEQ ID NO: 2445 - protein, 20 aa, Artificial Sequence
  Synthetically generated peptide
  VARIANT (1)...(20): Xaa = Any Amino Acid
PGTCXGXEIXCAXYAACTGC

SEQ ID NO: 2446 - protein, 20 aa, Artificial Sequence
  Synthetically generated peptide
  VARIANT (1)...(20): Xaa = Any Amino Acid
PGTCXGXEIXCAYXAACTGC

SEQ ID NO: 2447 - protein, 20 aa, Artificial Sequence
  Synthetically generated peptide
  VARIANT (1)...(20): Xaa = Any Amino Acid
PGTCXGXEIXCAYAXACTGC

SEQ ID NO: 2448 - protein, 20 aa, Artificial Sequence
  Synthetically generated peptide
  VARIANT (1)...(20): Xaa = Any Amino Acid
PGTCXGXEIXCAYAAXCTGC

SEQ ID NO: 2449 - protein, 20 aa, Artificial Sequence
  Synthetically generated peptide
  VARIANT (1)...(20): Xaa = Any Amino Acid
PGTCXGXEIXCAYAACXTGC

SEQ ID NO: 2450 - protein, 20 aa, Artificial Sequence
  Synthetically generated peptide
  VARIANT (1)...(20): Xaa = Any Amino Acid
PGTCXGXEIXCAYAACTXGC

SEQ ID NO: 2451 - protein, 20 aa, Artificial Sequence
  Synthetically generated peptide
  VARIANT (1)...(20): Xaa = Any Amino Acid
PGTCXGXEIXCAYAACTGXC

SEQ ID NO: 2452 - protein, 20 aa, Artificial Sequence
  Synthetically generated peptide
  VARIANT (1)...(20): Xaa = Any Amino Acid
PGTCXGXEIXCAYAACTGCX

SEQ ID NO: 2453 - protein, 19 aa, Artificial Sequence
  Synthetically generated peptide
  VARIANT (1)...(19): Xaa = Any Amino Acid
PGTCXGXEICXAYAACTGC

SEQ ID NO: 2454 - protein, 20 aa, Artificial Sequence
  Synthetically generated peptide
  VARIANT (1)...(20): Xaa = Any Amino Acid
PGTCXGXEICXXAYAACTGC

SEQ ID NO: 2455 - protein, 20 aa, Artificial Sequence
  Synthetically generated peptide
  VARIANT (1)...(20): Xaa = Any Amino Acid
PGTCXGXEICXAXYAACTGC

SEQ ID NO: 2456 - protein, 20 aa, Artificial Sequence
  Synthetically generated peptide
  VARIANT (1)...(20): Xaa = Any Amino Acid
PGTCXGXEICXAYXAACTGC

SEQ ID NO: 2457 - protein, 20 aa, Artificial Sequence
  Synthetically generated peptide
  VARIANT (1)...(20): Xaa = Any Amino Acid
PGTCXGXEICXAYAXACTGC

SEQ ID NO: 2458 - protein, 20 aa, Artificial Sequence
  Synthetically generated peptide
  VARIANT (1)...(20): Xaa = Any Amino Acid
PGTCXGXEICXAYAAXCTGC

SEQ ID NO: 2459 - protein, 20 aa, Artificial Sequence
  Synthetically generated peptide
  VARIANT (1)...(20): Xaa = Any Amino Acid
PGTCXGXEICXAYAACXTGC

SEQ ID NO: 2460 - protein, 20 aa, Artificial Sequence
  Synthetically generated peptide
  VARIANT (1)...(20): Xaa = Any Amino Acid
PGTCXGXEICXAYAACTXGC

SEQ ID NO: 2461 - protein, 20 aa, Artificial Sequence
  Synthetically generated peptide
  VARIANT (1)...(20): Xaa = Any Amino Acid
PGTCXGXEICXAYAACTGXC

SEQ ID NO: 2462 - protein, 20 aa, Artificial Sequence
  Synthetically generated peptide
  VARIANT (1)...(20): Xaa = Any Amino Acid
PGTCXGXEICXAYAACTGCX

SEQ ID NO: 2463 - protein, 19 aa, Artificial Sequence
  Synthetically generated peptide
  VARIANT (1)...(19): Xaa = Any Amino Acid
PGTCXGXEICAXYAACTGC

SEQ ID NO: 2464 - protein, 20 aa, Artificial Sequence
  Synthetically generated peptide
  VARIANT (1)...(20): Xaa = Any Amino Acid
PGTCXGXEICAXXYAACTGC

SEQ ID NO: 2465 - protein, 20 aa, Artificial Sequence
  Synthetically generated peptide
  VARIANT (1)...(20): Xaa = Any Amino Acid
PGTCXGXEICAXYXAACTGC

SEQ ID NO: 2466 - protein, 20 aa, Artificial Sequence
  Synthetically generated peptide
  VARIANT (1)...(20): Xaa = Any Amino Acid
PGTCXGXEICAXYAXACTGC

SEQ ID NO: 2467 - protein, 20 aa, Artificial Sequence
  Synthetically generated peptide
  VARIANT (1)...(20): Xaa = Any Amino Acid
PGTCXGXEICAXYAAXCTGC

SEQ ID NO: 2468 - protein, 20 aa, Artificial Sequence
  Synthetically generated peptide
  VARIANT (1)...(20): Xaa = Any Amino Acid
PGTCXGXEICAXYAACXTGC

SEQ ID NO: 2469 - protein, 20 aa, Artificial Sequence
  Synthetically generated peptide
  VARIANT (1)...(20): Xaa = Any Amino Acid
PGTCXGXEICAXYAACTXGC

SEQ ID NO: 2470 - protein, 20 aa, Artificial Sequence
  Synthetically generated peptide
  VARIANT (1)...(20): Xaa = Any Amino Acid
PGTCXGXEICAXYAACTGXC

SEQ ID NO: 2471 - protein, 20 aa, Artificial Sequence
  Synthetically generated peptide
  VARIANT (1)...(20): Xaa = Any Amino Acid
PGTCXGXEICAXYAACTGCX

SEQ ID NO: 2472 - protein, 19 aa, Artificial Sequence
  Synthetically generated peptide
  VARIANT (1)...(19): Xaa = Any Amino Acid
PGTCXGXEICAYXAACTGC

SEQ ID NO: 2473 - protein, 20 aa, Artificial Sequence
  Synthetically generated peptide
  VARIANT (1)...(20): Xaa = Any Amino Acid
PGTCXGXEICAYXXAACTGC

SEQ ID NO: 2474 - protein, 20 aa, Artificial Sequence
  Synthetically generated peptide
  VARIANT (1)...(20): Xaa = Any Amino Acid
PGTCXGXEICAYXAXACTGC

SEQ ID NO: 2475 - protein, 20 aa, Artificial Sequence
  Synthetically generated peptide
  VARIANT (1)...(20): Xaa = Any Amino Acid
PGTCXGXEICAYXAAXCTGC

SEQ ID NO: 2476 - protein, 20 aa, Artificial Sequence
  Synthetically generated peptide
  VARIANT (1)...(20): Xaa = Any Amino Acid
PGTCXGXEICAYXAACXTGC

SEQ ID NO: 2477 - protein, 20 aa, Artificial Sequence
  Synthetically generated peptide
  VARIANT (1)...(20): Xaa = Any Amino Acid
PGTCXGXEICAYXAACTXGC

SEQ ID NO: 2478 - protein, 20 aa, Artificial Sequence
  Synthetically generated peptide
  VARIANT (1)...(20): Xaa = Any Amino Acid
PGTCXGXEICAYXAACTGXC

SEQ ID NO: 2479 - protein, 20 aa, Artificial Sequence
  Synthetically generated peptide
  VARIANT (1)...(20): Xaa = Any Amino Acid
PGTCXGXEICAYXAACTGCX

SEQ ID NO: 2480 - protein, 19 aa, Artificial Sequence
  Synthetically generated peptide
  VARIANT (1)...(19): Xaa = Any Amino Acid
PGTCXGXEICAYAXACTGC

SEQ ID NO: 2481 - protein, 20 aa, Artificial Sequence
  Synthetically generated peptide
  VARIANT (1)...(20): Xaa = Any Amino Acid
PGTCXGXEICAYAXXACTGC

SEQ ID NO: 2482 - protein, 20 aa, Artificial Sequence
  Synthetically generated peptide
  VARIANT (1)...(20): Xaa = Any Amino Acid
PGTCXGXEICAYAXAXCTGC

SEQ ID NO: 2483 - protein, 20 aa, Artificial Sequence
  Synthetically generated peptide
  VARIANT (1)...(20): Xaa = Any Amino Acid
PGTCXGXEICAYAXACXTGC

SEQ ID NO: 2484 - protein, 20 aa, Artificial Sequence
  Synthetically generated peptide
  VARIANT (1)...(20): Xaa = Any Amino Acid
PGTCXGXEICAYAXACTXGC

SEQ ID NO: 2485 - protein, 20 aa, Artificial Sequence
  Synthetically generated peptide
  VARIANT (1)...(20): Xaa = Any Amino Acid
PGTCXGXEICAYAXACTGXC

SEQ ID NO: 2486 - protein, 20 aa, Artificial Sequence
  Synthetically generated peptide
  VARIANT (1)...(20): Xaa = Any Amino Acid
PGTCXGXEICAYAXACTGCX

SEQ ID NO: 2487 - protein, 19 aa, Artificial Sequence
  Synthetically generated peptide
  VARIANT (1)...(19): Xaa = Any Amino Acid
PGTCXGXEICAYAAXCTGC

SEQ ID NO: 2488 - protein, 20 aa, Artificial Sequence
  Synthetically generated peptide
  VARIANT (1)...(20): Xaa = Any Amino Acid
PGTCXGXEICAYAAXXCTGC

SEQ ID NO: 2489 - protein, 20 aa, Artificial Sequence
  Synthetically generated peptide
  VARIANT (1)...(20): Xaa = Any Amino Acid
PGTCXGXEICAYAAXCXTGC

SEQ ID NO: 2490 - protein, 20 aa, Artificial Sequence
  Synthetically generated peptide
  VARIANT (1)...(20): Xaa = Any Amino Acid
PGTCXGXEICAYAAXCTXGC

SEQ ID NO: 2491 - protein, 20 aa, Artificial Sequence
  Synthetically generated peptide
  VARIANT (1)...(20): Xaa = Any Amino Acid
PGTCXGXEICAYAAXCTGXC

SEQ ID NO: 2492 - protein, 20 aa, Artificial Sequence
  Synthetically generated peptide
  VARIANT (1)...(20): Xaa = Any Amino Acid
PGTCXGXEICAYAAXCTGCX

SEQ ID NO: 2493 - protein, 19 aa, Artificial Sequence
  Synthetically generated peptide
  VARIANT (1)...(19): Xaa = Any Amino Acid
PGTCXGXEICAYAACXTGC

SEQ ID NO: 2494 - protein, 20 aa, Artificial Sequence
  Synthetically generated peptide
  VARIANT (1)...(20): Xaa = Any Amino Acid
PGTCXGXEICAYAACXXTGC

SEQ ID NO: 2495 - protein, 20 aa, Artificial Sequence
  Synthetically generated peptide
  VARIANT (1)...(20): Xaa = Any Amino Acid
PGTCXGXEICAYAACXTXGC

SEQ ID NO: 2496 - protein, 20 aa, Artificial Sequence
  Synthetically generated peptide
  VARIANT (1)...(20): Xaa = Any Amino Acid
PGTCXGXEICAYAACXTGXC

SEQ ID NO: 2497 - protein, 20 aa, Artificial Sequence
  Synthetically generated peptide
  VARIANT (1)...(20): Xaa = Any Amino Acid
PGTCXGXEICAYAACXTGCX

SEQ ID NO: 2498 - protein, 19 aa, Artificial Sequence
  Synthetically generated peptide
  VARIANT (1)...(19): Xaa = Any Amino Acid
PGTCXGXEICAYAACTXGC

SEQ ID NO: 2499 - protein, 20 aa, Artificial Sequence
  Synthetically generated peptide
  VARIANT (1)...(20): Xaa = Any Amino Acid
PGTCXGXEICAYAACTXXGC

SEQ ID NO: 2500 - protein, 20 aa, Artificial Sequence
  Synthetically generated peptide
  VARIANT (1)...(20): Xaa = Any Amino Acid
PGTCXGXEICAYAACTXGXC

SEQ ID NO: 2501 - protein, 20 aa, Artificial Sequence
  Synthetically generated peptide
  VARIANT (1)...(20): Xaa = Any Amino Acid
PGTCXGXEICAYAACTXGCX

SEQ ID NO: 2502 - protein, 19 aa, Artificial Sequence
  Synthetically generated peptide
  VARIANT (1)...(19): Xaa = Any Amino Acid
PGTCXGXEICAYAACTGXC

SEQ ID NO: 2503 - protein, 20 aa, Artificial Sequence
  Synthetically generated peptide
  VARIANT (1)...(20): Xaa = Any Amino Acid
PGTCXGXEICAYAACTGXXC

SEQ ID NO: 2504 - protein, 20 aa, Artificial Sequence
  Synthetically generated peptide
  VARIANT (1)...(20): Xaa = Any Amino Acid
PGTCXGXEICAYAACTGXCX

SEQ ID NO: 2505 - protein, 19 aa, Artificial Sequence
  Synthetically generated peptide
  VARIANT (1)...(19): Xaa = Any Amino Acid
PGTCXGXEICAYAACTGCX

SEQ ID NO: 2506 - protein, 20 aa, Artificial Sequence
  Synthetically generated peptide
  VARIANT (1)...(20): Xaa = Any Amino Acid
PGTCXGXEICAYAACTGCXX

SEQ ID NO: 2507 - protein, 18 aa, Artificial Sequence
  Synthetically generated peptide
  VARIANT (1)...(18): Xaa = Any Amino Acid
PGTCXGEXICAYAACTGC

SEQ ID NO: 2508 - protein, 19 aa, Artificial Sequence
  Synthetically generated peptide
  VARIANT (1)...(19): Xaa = Any Amino Acid
PGTCXGEXXICAYAACTGC

SEQ ID NO: 2509 - protein, 20 aa, Artificial Sequence
  Synthetically generated peptide
  VARIANT (1)...(20): Xaa = Any Amino Acid
PGTCXGEXXXICAYAACTGC

SEQ ID NO: 2510 - protein, 20 aa, Artificial Sequence
  Synthetically generated peptide
  VARIANT (1)...(20): Xaa = Any Amino Acid
PGTCXGEXXIXCAYAACTGC

SEQ ID NO: 2511 - protein, 20 aa, Artificial Sequence
  Synthetically generated peptide
  VARIANT (1)...(20): Xaa = Any Amino Acid
PGTCXGEXXICXAYAACTGC

SEQ ID NO: 2512 - protein, 20 aa, Artificial Sequence
  Synthetically generated peptide
  VARIANT (1)...(20): Xaa = Any Amino Acid
PGTCXGEXXICAXYAACTGC

SEQ ID NO: 2513 - protein, 20 aa, Artificial Sequence
  Synthetically generated peptide
  VARIANT (1)...(20): Xaa = Any Amino Acid
PGTCXGEXXICAYXAACTGC

SEQ ID NO: 2514 - protein, 20 aa, Artificial Sequence
  Synthetically generated peptide
  VARIANT (1)...(20): Xaa = Any Amino Acid
PGTCXGEXXICAYAXACTGC

SEQ ID NO: 2515 - protein, 20 aa, Artificial Sequence
  Synthetically generated peptide
  VARIANT (1)...(20): Xaa = Any Amino Acid
PGTCXGEXXICAYAAXCTGC

SEQ ID NO: 2516 - protein, 20 aa, Artificial Sequence
  Synthetically generated peptide
  VARIANT (1)...(20): Xaa = Any Amino Acid
PGTCXGEXXICAYAACXTGC

SEQ ID NO: 2517 - protein, 20 aa, Artificial Sequence
  Synthetically generated peptide
  VARIANT (1)...(20): Xaa = Any Amino Acid
PGTCXGEXXICAYAACTXGC

SEQ ID NO: 2518 - protein, 20 aa, Artificial Sequence
  Synthetically generated peptide
  VARIANT (1)...(20): Xaa = Any Amino Acid
PGTCXGEXXICAYAACTGXC

SEQ ID NO: 2519 - protein, 20 aa, Artificial Sequence
  Synthetically generated peptide
  VARIANT (1)...(20): Xaa = Any Amino Acid
PGTCXGEXXICAYAACTGCX

SEQ ID NO: 2520 - protein, 19 aa, Artificial Sequence
  Synthetically generated peptide
  VARIANT (1)...(19): Xaa = Any Amino Acid
PGTCXGEXIXCAYAACTGC

SEQ ID NO: 2521 - protein, 20 aa, Artificial Sequence
  Synthetically generated peptide
  VARIANT (1)...(20): Xaa = Any Amino Acid
PGTCXGEXIXXCAYAACTGC

SEQ ID NO: 2522 - protein, 20 aa, Artificial Sequence
  Synthetically generated peptide
  VARIANT (1)...(20): Xaa = Any Amino Acid
PGTCXGEXIXCXAYAACTGC

SEQ ID NO: 2523 - protein, 20 aa, Artificial Sequence
  Synthetically generated peptide
  VARIANT (1)...(20): Xaa = Any Amino Acid
PGTCXGEXIXCAXYAACTGC

SEQ ID NO: 2524 - protein, 20 aa, Artificial Sequence
  Synthetically generated peptide
  VARIANT (1)...(20): Xaa = Any Amino Acid
PGTCXGEXIXCAYXAACTGC

SEQ ID NO: 2525 - protein, 20 aa, Artificial Sequence
  Synthetically generated peptide
  VARIANT (1)...(20): Xaa = Any Amino Acid
PGTCXGEXIXCAYAXACTGC

SEQ ID NO: 2526 - protein, 20 aa, Artificial Sequence
  Synthetically generated peptide
  VARIANT (1)...(20): Xaa = Any Amino Acid
PGTCXGEXIXCAYAAXCTGC

SEQ ID NO: 2527 - protein, 20 aa, Artificial Sequence
  Synthetically generated peptide
  VARIANT (1)...(20): Xaa = Any Amino Acid
PGTCXGEXIXCAYAACXTGC

SEQ ID NO: 2528 - protein, 20 aa, Artificial Sequence
  Synthetically generated peptide
  VARIANT (1)...(20): Xaa = Any Amino Acid
PGTCXGEXIXCAYAACTXGC

SEQ ID NO: 2529 - protein, 20 aa, Artificial Sequence
  Synthetically generated peptide
  VARIANT (1)...(20): Xaa = Any Amino Acid
PGTCXGEXIXCAYAACTGXC

SEQ ID NO: 2530 - protein, 20 aa, Artificial Sequence
  Synthetically generated peptide
  VARIANT (1)...(20): Xaa = Any Amino Acid
PGTCXGEXIXCAYAACTGCX

SEQ ID NO: 2531 - protein, 19 aa, Artificial Sequence
  Synthetically generated peptide
  VARIANT (1)...(19): Xaa = Any Amino Acid
PGTCXGEXICXAYAACTGC

SEQ ID NO: 2532 - protein, 20 aa, Artificial Sequence
  Synthetically generated peptide
  VARIANT (1)...(20): Xaa = Any Amino Acid
PGTCXGEXICXXAYAACTGC

SEQ ID NO: 2533 - protein, 20 aa, Artificial Sequence
  Synthetically generated peptide
  VARIANT (1)...(20): Xaa = Any Amino Acid
PGTCXGEXICXAXYAACTGC

SEQ ID NO: 2534 - protein, 20 aa, Artificial Sequence
  Synthetically generated peptide
  VARIANT (1)...(20): Xaa = Any Amino Acid
PGTCXGEXICXAYXAACTGC

SEQ ID NO: 2535 - protein, 20 aa, Artificial Sequence
  Synthetically generated peptide
  VARIANT (1)...(20): Xaa = Any Amino Acid
PGTCXGEXICXAYAXACTGC

SEQ ID NO: 2536 - protein, 20 aa, Artificial Sequence
  Synthetically generated peptide
  VARIANT (1)...(20): Xaa = Any Amino Acid
PGTCXGEXICXAYAAXCTGC

SEQ ID NO: 2537 - protein, 20 aa, Artificial Sequence
  Synthetically generated peptide
  VARIANT (1)...(20): Xaa = Any Amino Acid
PGTCXGEXICXAYAACXTGC

SEQ ID NO: 2538 - protein, 20 aa, Artificial Sequence
  Synthetically generated peptide
  VARIANT (1)...(20): Xaa = Any Amino Acid
PGTCXGEXICXAYAACTXGC

SEQ ID NO: 2539 - protein, 20 aa, Artificial Sequence
  Synthetically generated peptide
  VARIANT (1)...(20): Xaa = Any Amino Acid
PGTCXGEXICXAYAACTGXC

SEQ ID NO: 2540 - protein, 20 aa, Artificial Sequence
  Synthetically generated peptide
  VARIANT (1)...(20): Xaa = Any Amino Acid
PGTCXGEXICXAYAACTGCX

SEQ ID NO: 2541 - protein, 19 aa, Artificial Sequence
  Synthetically generated peptide
  VARIANT (1)...(19): Xaa = Any Amino Acid
PGTCXGEXICAXYAACTGC

SEQ ID NO: 2542 - protein, 20 aa, Artificial Sequence
  Synthetically generated peptide
  VARIANT (1)...(20): Xaa = Any Amino Acid
PGTCXGEXICAXXYAACTGC

SEQ ID NO: 2543 - protein, 20 aa, Artificial Sequence
  Synthetically generated peptide
  VARIANT (1)...(20): Xaa = Any Amino Acid
PGTCXGEXICAXYXAACTGC

SEQ ID NO: 2544 - protein, 20 aa, Artificial Sequence
  Synthetically generated peptide
  VARIANT (1)...(20): Xaa = Any Amino Acid
PGTCXGEXICAXYAXACTGC

SEQ ID NO: 2545 - protein, 20 aa, Artificial Sequence
  Synthetically generated peptide
  VARIANT (1)...(20): Xaa = Any Amino Acid
PGTCXGEXICAXYAAXCTGC

SEQ ID NO: 2546 - protein, 20 aa, Artificial Sequence
  Synthetically generated peptide
  VARIANT (1)...(20): Xaa = Any Amino Acid
PGTCXGEXICAXYAACXTGC

SEQ ID NO: 2547 - protein, 20 aa, Artificial Sequence
  Synthetically generated peptide
  VARIANT (1)...(20): Xaa = Any Amino Acid
PGTCXGEXICAXYAACTXGC

SEQ ID NO: 2548 - protein, 20 aa, Artificial Sequence
  Synthetically generated peptide
  VARIANT (1)...(20): Xaa = Any Amino Acid
PGTCXGEXICAXYAACTGXC

SEQ ID NO: 2549 - protein, 20 aa, Artificial Sequence
  Synthetically generated peptide
  VARIANT (1)...(20): Xaa = Any Amino Acid
PGTCXGEXICAXYAACTGCX

SEQ ID NO: 2550 - protein, 19 aa, Artificial Sequence
  Synthetically generated peptide
  VARIANT (1)...(19): Xaa = Any Amino Acid
PGTCXGEXICAYXAACTGC

SEQ ID NO: 2551 - protein, 20 aa, Artificial Sequence
  Synthetically generated peptide
  VARIANT (1)...(20): Xaa = Any Amino Acid
PGTCXGEXICAYXXAACTGC

SEQ ID NO: 2552 - protein, 20 aa, Artificial Sequence
  Synthetically generated peptide
  VARIANT (1)...(20): Xaa = Any Amino Acid
PGTCXGEXICAYXAXACTGC

SEQ ID NO: 2553 - protein, 20 aa, Artificial Sequence
  Synthetically generated peptide
  VARIANT (1)...(20): Xaa = Any Amino Acid
PGTCXGEXICAYXAAXCTGC

SEQ ID NO: 2554 - protein, 20 aa, Artificial Sequence
  Synthetically generated peptide
  VARIANT (1)...(20): Xaa = Any Amino Acid
PGTCXGEXICAYXAACXTGC

SEQ ID NO: 2555 - protein, 20 aa, Artificial Sequence
  Synthetically generated peptide
  VARIANT (1)...(20): Xaa = Any Amino Acid
PGTCXGEXICAYXAACTXGC

SEQ ID NO: 2556 - protein, 20 aa, Artificial Sequence
  Synthetically generated peptide
  VARIANT (1)...(20): Xaa = Any Amino Acid
PGTCXGEXICAYXAACTGXC

SEQ ID NO: 2557 - protein, 20 aa, Artificial Sequence
  Synthetically generated peptide
  VARIANT (1)...(20): Xaa = Any Amino Acid
PGTCXGEXICAYXAACTGCX

SEQ ID NO: 2558 - protein, 19 aa, Artificial Sequence
  Synthetically generated peptide
  VARIANT (1)...(19): Xaa = Any Amino Acid
PGTCXGEXICAYAXACTGC

SEQ ID NO: 2559 - protein, 20 aa, Artificial Sequence
  Synthetically generated peptide
  VARIANT (1)...(20): Xaa = Any Amino Acid
PGTCXGEXICAYAXXACTGC

SEQ ID NO: 2560 - protein, 20 aa, Artificial Sequence
  Synthetically generated peptide
  VARIANT (1)...(20): Xaa = Any Amino Acid
PGTCXGEXICAYAXAXCTGC

SEQ ID NO: 2561 - protein, 20 aa, Artificial Sequence
  Synthetically generated peptide
  VARIANT (1)...(20): Xaa = Any Amino Acid
PGTCXGEXICAYAXACXTGC

SEQ ID NO: 2562 - protein, 20 aa, Artificial Sequence
  Synthetically generated peptide
  VARIANT (1)...(20): Xaa = Any Amino Acid
PGTCXGEXICAYAXACTXGC

SEQ ID NO: 2563 - protein, 20 aa, Artificial Sequence
  Synthetically generated peptide
  VARIANT (1)...(20): Xaa = Any Amino Acid
PGTCXGEXICAYAXACTGXC

SEQ ID NO: 2564 - protein, 20 aa, Artificial Sequence
  Synthetically generated peptide
  VARIANT (1)...(20): Xaa = Any Amino Acid
PGTCXGEXICAYAXACTGCX

SEQ ID NO: 2565 - protein, 19 aa, Artificial Sequence
  Synthetically generated peptide
  VARIANT (1)...(19): Xaa = Any Amino Acid
PGTCXGEXICAYAAXCTGC

SEQ ID NO: 2566 - protein, 20 aa, Artificial Sequence
  Synthetically generated peptide
  VARIANT (1)...(20): Xaa = Any Amino Acid
PGTCXGEXICAYAAXXCTGC

SEQ ID NO: 2567 - protein, 20 aa, Artificial Sequence
  Synthetically generated peptide
  VARIANT (1)...(20): Xaa = Any Amino Acid
PGTCXGEXICAYAAXCXTGC

SEQ ID NO: 2568 - protein, 20 aa, Artificial Sequence
  Synthetically generated peptide
  VARIANT (1)...(20): Xaa = Any Amino Acid
PGTCXGEXICAYAAXCTXGC

SEQ ID NO: 2569 - protein, 20 aa, Artificial Sequence
  Synthetically generated peptide
  VARIANT (1)...(20): Xaa = Any Amino Acid
PGTCXGEXICAYAAXCTGXC

SEQ ID NO: 2570 - protein, 20 aa, Artificial Sequence
  Synthetically generated peptide
  VARIANT (1)...(20): Xaa = Any Amino Acid
PGTCXGEXICAYAAXCTGCX

SEQ ID NO: 2571 - protein, 19 aa, Artificial Sequence
  Synthetically generated peptide
  VARIANT (1)...(19): Xaa = Any Amino Acid
PGTCXGEXICAYAACXTGC

SEQ ID NO: 2572 - protein, 20 aa, Artificial Sequence
  Synthetically generated peptide
  VARIANT (1)...(20): Xaa = Any Amino Acid
PGTCXGEXICAYAACXXTGC

SEQ ID NO: 2573 - protein, 20 aa, Artificial Sequence
  Synthetically generated peptide
  VARIANT (1)...(20): Xaa = Any Amino Acid
PGTCXGEXICAYAACXTXGC

SEQ ID NO: 2574 - protein, 20 aa, Artificial Sequence
  Synthetically generated peptide
  VARIANT (1)...(20): Xaa = Any Amino Acid
PGTCXGEXICAYAACXTGXC

SEQ ID NO: 2575 - protein, 20 aa, Artificial Sequence
  Synthetically generated peptide
  VARIANT (1)...(20): Xaa = Any Amino Acid
PGTCXGEXICAYAACXTGCX

SEQ ID NO: 2576 - protein, 19 aa, Artificial Sequence
  Synthetically generated peptide
  VARIANT (1)...(19): Xaa = Any Amino Acid
PGTCXGEXICAYAACTXGC

SEQ ID NO: 2577 - protein, 20 aa, Artificial Sequence
  Synthetically generated peptide
  VARIANT (1)...(20): Xaa = Any Amino Acid
PGTCXGEXICAYAACTXXGC

SEQ ID NO: 2578 - protein, 20 aa, Artificial Sequence
  Synthetically generated peptide
  VARIANT (1)...(20): Xaa = Any Amino Acid
PGTCXGEXICAYAACTXGXC

SEQ ID NO: 2579 - protein, 20 aa, Artificial Sequence
  Synthetically generated peptide
  VARIANT (1)...(20): Xaa = Any Amino Acid
PGTCXGEXICAYAACTXGCX

SEQ ID NO: 2580 - protein, 19 aa, Artificial Sequence
  Synthetically generated peptide
  VARIANT (1)...(19): Xaa = Any Amino Acid
PGTCXGEXICAYAACTGXC

SEQ ID NO: 2581 - protein, 20 aa, Artificial Sequence
  Synthetically generated peptide
  VARIANT (1)...(20): Xaa = Any Amino Acid
PGTCXGEXICAYAACTGXXC

SEQ ID NO: 2582 - protein, 20 aa, Artificial Sequence
  Synthetically generated peptide
  VARIANT (1)...(20): Xaa = Any Amino Acid
PGTCXGEXICAYAACTGXCX

SEQ ID NO: 2583 - protein, 19 aa, Artificial Sequence
  Synthetically generated peptide
  VARIANT (1)...(19): Xaa = Any Amino Acid
PGTCXGEXICAYAACTGCX

SEQ ID NO: 2584 - protein, 20 aa, Artificial Sequence
  Synthetically generated peptide
  VARIANT (1)...(20): Xaa = Any Amino Acid
PGTCXGEXICAYAACTGCXX

SEQ ID NO: 2585 - protein, 18 aa, Artificial Sequence
  Synthetically generated peptide
  VARIANT (1)...(18): Xaa = Any Amino Acid
PGTCXGEIXCAYAACTGC

SEQ ID NO: 2586 - protein, 19 aa, Artificial Sequence
  Synthetically generated peptide
  VARIANT (1)...(19): Xaa = Any Amino Acid
PGTCXGEIXXCAYAACTGC

SEQ ID NO: 2587 - protein, 20 aa, Artificial Sequence
  Synthetically generated peptide
  VARIANT (1)...(20): Xaa = Any Amino Acid
PGTCXGEIXXXCAYAACTGC

SEQ ID NO: 2588 - protein, 20 aa, Artificial Sequence
  Synthetically generated peptide
  VARIANT (1)...(20): Xaa = Any Amino Acid
PGTCXGEIXXCXAYAACTGC

SEQ ID NO: 2589 - protein, 20 aa, Artificial Sequence
  Synthetically generated peptide
  VARIANT (1)...(20): Xaa = Any Amino Acid
PGTCXGEIXXCAXYAACTGC

SEQ ID NO: 2590 - protein, 20 aa, Artificial Sequence
  Synthetically generated peptide
  VARIANT (1)...(20): Xaa = Any Amino Acid
PGTCXGEIXXCAYXAACTGC

SEQ ID NO: 2591 - protein, 20 aa, Artificial Sequence
  Synthetically generated peptide
  VARIANT (1)...(20): Xaa = Any Amino Acid
PGTCXGEIXXCAYAXACTGC

SEQ ID NO: 2592 - protein, 20 aa, Artificial Sequence
  Synthetically generated peptide
  VARIANT (1)...(20): Xaa = Any Amino Acid
PGTCXGEIXXCAYAAXCTGC

SEQ ID NO: 2593 - protein, 20 aa, Artificial Sequence
  Synthetically generated peptide
  VARIANT (1)...(20): Xaa = Any Amino Acid
PGTCXGEIXXCAYAACXTGC

SEQ ID NO: 2594 - protein, 20 aa, Artificial Sequence
  Synthetically generated peptide
  VARIANT (1)...(20): Xaa = Any Amino Acid
PGTCXGEIXXCAYAACTXGC

SEQ ID NO: 2595 - protein, 20 aa, Artificial Sequence
  Synthetically generated peptide
  VARIANT (1)...(20): Xaa = Any Amino Acid
PGTCXGEIXXCAYAACTGXC

SEQ ID NO: 2596 - protein, 20 aa, Artificial Sequence
  Synthetically generated peptide
  VARIANT (1)...(20): Xaa = Any Amino Acid
PGTCXGEIXXCAYAACTGCX

SEQ ID NO: 2597 - protein, 19 aa, Artificial Sequence
  Synthetically generated peptide
  VARIANT (1)...(19): Xaa = Any Amino Acid
PGTCXGEIXCXAYAACTGC

SEQ ID NO: 2598 - protein, 20 aa, Artificial Sequence
  Synthetically generated peptide
  VARIANT (1)...(20): Xaa = Any Amino Acid
PGTCXGEIXCXXAYAACTGC

SEQ ID NO: 2599 - protein, 20 aa, Artificial Sequence
  Synthetically generated peptide
  VARIANT (1)...(20): Xaa = Any Amino Acid
PGTCXGEIXCXAXYAACTGC

SEQ ID NO: 2600 - protein, 20 aa, Artificial Sequence
  Synthetically generated peptide
  VARIANT (1)...(20): Xaa = Any Amino Acid
PGTCXGEIXCXAYXAACTGC

SEQ ID NO: 2601 - protein, 20 aa, Artificial Sequence
  Synthetically generated peptide
  VARIANT (1)...(20): Xaa = Any Amino Acid
PGTCXGEIXCXAYAXACTGC

SEQ ID NO: 2602 - protein, 20 aa, Artificial Sequence
  Synthetically generated peptide
  VARIANT (1)...(20): Xaa = Any Amino Acid
PGTCXGEIXCXAYAAXCTGC

SEQ ID NO: 2603 - protein, 20 aa, Artificial Sequence
  Synthetically generated peptide
  VARIANT (1)...(20): Xaa = Any Amino Acid
PGTCXGEIXCXAYAACXTGC

SEQ ID NO: 2604 - protein, 20 aa, Artificial Sequence
  Synthetically generated peptide
  VARIANT (1)...(20): Xaa = Any Amino Acid
PGTCXGEIXCXAYAACTXGC

SEQ ID NO: 2605 - protein, 20 aa, Artificial Sequence
  Synthetically generated peptide
  VARIANT (1)...(20): Xaa = Any Amino Acid
PGTCXGEIXCXAYAACTGXC

SEQ ID NO: 2606 - protein, 20 aa, Artificial Sequence
  Synthetically generated peptide
  VARIANT (1)...(20): Xaa = Any Amino Acid
PGTCXGEIXCXAYAACTGCX

SEQ ID NO: 2607 - protein, 19 aa, Artificial Sequence
  Synthetically generated peptide
  VARIANT (1)...(19): Xaa = Any Amino Acid
PGTCXGEIXCAXYAACTGC

SEQ ID NO: 2608 - protein, 20 aa, Artificial Sequence
  Synthetically generated peptide
  VARIANT (1)...(20): Xaa = Any Amino Acid
PGTCXGEIXCAXXYAACTGC

SEQ ID NO: 2609 - protein, 20 aa, Artificial Sequence
  Synthetically generated peptide
  VARIANT (1)...(20): Xaa = Any Amino Acid
PGTCXGEIXCAXYXAACTGC

SEQ ID NO: 2610 - protein, 20 aa, Artificial Sequence
  Synthetically generated peptide
  VARIANT (1)...(20): Xaa = Any Amino Acid
PGTCXGEIXCAXYAXACTGC

SEQ ID NO: 2611 - protein, 20 aa, Artificial Sequence
  Synthetically generated peptide
  VARIANT (1)...(20): Xaa = Any Amino Acid
PGTCXGEIXCAXYAAXCTGC

SEQ ID NO: 2612 - protein, 20 aa, Artificial Sequence
  Synthetically generated peptide
  VARIANT (1)...(20): Xaa = Any Amino Acid
PGTCXGEIXCAXYAACXTGC

SEQ ID NO: 2613 - protein, 20 aa, Artificial Sequence
  Synthetically generated peptide
  VARIANT (1)...(20): Xaa = Any Amino Acid
PGTCXGEIXCAXYAACTXGC

SEQ ID NO: 2614 - protein, 20 aa, Artificial Sequence
  Synthetically generated peptide
  VARIANT (1)...(20): Xaa = Any Amino Acid
PGTCXGEIXCAXYAACTGXC

SEQ ID NO: 2615 - protein, 20 aa, Artificial Sequence
  Synthetically generated peptide
  VARIANT (1)...(20): Xaa = Any Amino Acid
PGTCXGEIXCAXYAACTGCX

SEQ ID NO: 2616 - protein, 19 aa, Artificial Sequence
  Synthetically generated peptide
  VARIANT (1)...(19): Xaa = Any Amino Acid
PGTCXGEIXCAYXAACTGC

SEQ ID NO: 2617 - protein, 20 aa, Artificial Sequence
  Synthetically generated peptide
  VARIANT (1)...(20): Xaa = Any Amino Acid
PGTCXGEIXCAYXXAACTGC

SEQ ID NO: 2618 - protein, 20 aa, Artificial Sequence
  Synthetically generated peptide
  VARIANT (1)...(20): Xaa = Any Amino Acid
PGTCXGEIXCAYXAXACTGC

SEQ ID NO: 2619 - protein, 20 aa, Artificial Sequence
  Synthetically generated peptide
  VARIANT (1)...(20): Xaa = Any Amino Acid
PGTCXGEIXCAYXAAXCTGC

SEQ ID NO: 2620 - protein, 20 aa, Artificial Sequence
  Synthetically generated peptide
  VARIANT (1)...(20): Xaa = Any Amino Acid
PGTCXGEIXCAYXAACXTGC

SEQ ID NO: 2621 - protein, 20 aa, Artificial Sequence
  Synthetically generated peptide
  VARIANT (1)...(20): Xaa = Any Amino Acid
PGTCXGEIXCAYXAACTXGC

SEQ ID NO: 2622 - protein, 20 aa, Artificial Sequence
  Synthetically generated peptide
  VARIANT (1)...(20): Xaa = Any Amino Acid
PGTCXGEIXCAYXAACTGXC

SEQ ID NO: 2623 - protein, 20 aa, Artificial Sequence
  Synthetically generated peptide
  VARIANT (1)...(20): Xaa = Any Amino Acid
PGTCXGEIXCAYXAACTGCX

SEQ ID NO: 2624 - protein, 19 aa, Artificial Sequence
  Synthetically generated peptide
  VARIANT (1)...(19): Xaa = Any Amino Acid
PGTCXGEIXCAYAXACTGC

SEQ ID NO: 2625 - protein, 20 aa, Artificial Sequence
  Synthetically generated peptide
  VARIANT (1)...(20): Xaa = Any Amino Acid
PGTCXGEIXCAYAXXACTGC

SEQ ID NO: 2626 - protein, 20 aa, Artificial Sequence
  Synthetically generated peptide
  VARIANT (1)...(20): Xaa = Any Amino Acid
PGTCXGEIXCAYAXAXCTGC

SEQ ID NO: 2627 - protein, 20 aa, Artificial Sequence
  Synthetically generated peptide
  VARIANT (1)...(20): Xaa = Any Amino Acid
PGTCXGEIXCAYAXACXTGC

SEQ ID NO: 2628 - protein, 20 aa, Artificial Sequence
  Synthetically generated peptide
  VARIANT (1)...(20): Xaa = Any Amino Acid
PGTCXGEIXCAYAXACTXGC

SEQ ID NO: 2629 - protein, 20 aa, Artificial Sequence
  Synthetically generated peptide
  VARIANT (1)...(20): Xaa = Any Amino Acid
PGTCXGEIXCAYAXACTGXC

SEQ ID NO: 2630 - protein, 20 aa, Artificial Sequence
  Synthetically generated peptide
  VARIANT (1)...(20): Xaa = Any Amino Acid
PGTCXGEIXCAYAXACTGCX

SEQ ID NO: 2631 - protein, 19 aa, Artificial Sequence
  Synthetically generated peptide
  VARIANT (1)...(19): Xaa = Any Amino Acid
PGTCXGEIXCAYAAXCTGC

SEQ ID NO: 2632 - protein, 20 aa, Artificial Sequence
  Synthetically generated peptide
  VARIANT (1)...(20): Xaa = Any Amino Acid
PGTCXGEIXCAYAAXXCTGC

SEQ ID NO: 2633 - protein, 20 aa, Artificial Sequence
  Synthetically generated peptide
  VARIANT (1)...(20): Xaa = Any Amino Acid
PGTCXGEIXCAYAAXCXTGC

SEQ ID NO: 2634 - protein, 20 aa, Artificial Sequence
  Synthetically generated peptide
  VARIANT (1)...(20): Xaa = Any Amino Acid
PGTCXGEIXCAYAAXCTXGC

SEQ ID NO: 2635 - protein, 20 aa, Artificial Sequence
  Synthetically generated peptide
  VARIANT (1)...(20): Xaa = Any Amino Acid
PGTCXGEIXCAYAAXCTGXC

SEQ ID NO: 2636 - protein, 20 aa, Artificial Sequence
  Synthetically generated peptide
  VARIANT (1)...(20): Xaa = Any Amino Acid
PGTCXGEIXCAYAAXCTGCX

SEQ ID NO: 2637 - protein, 19 aa, Artificial Sequence
  Synthetically generated peptide
  VARIANT (1)...(19): Xaa = Any Amino Acid
PGTCXGEIXCAYAACXTGC

SEQ ID NO: 2638 - protein, 20 aa, Artificial Sequence
  Synthetically generated peptide
  VARIANT (1)...(20): Xaa = Any Amino Acid
PGTCXGEIXCAYAACXXTGC

SEQ ID NO: 2639 - protein, 20 aa, Artificial Sequence
  Synthetically generated peptide
  VARIANT (1)...(20): Xaa = Any Amino Acid
PGTCXGEIXCAYAACXTXGC

SEQ ID NO: 2640 - protein, 20 aa, Artificial Sequence
  Synthetically generated peptide
  VARIANT (1)...(20): Xaa = Any Amino Acid
PGTCXGEIXCAYAACXTGXC

SEQ ID NO: 2641 - protein, 20 aa, Artificial Sequence
  Synthetically generated peptide
  VARIANT (1)...(20): Xaa = Any Amino Acid
PGTCXGEIXCAYAACXTGCX

SEQ ID NO: 2642 - protein, 19 aa, Artificial Sequence
  Synthetically generated peptide
  VARIANT (1)...(19): Xaa = Any Amino Acid
PGTCXGEIXCAYAACTXGC

SEQ ID NO: 2643 - protein, 20 aa, Artificial Sequence
  Synthetically generated peptide
  VARIANT (1)...(20): Xaa = Any Amino Acid
PGTCXGEIXCAYAACTXXGC

SEQ ID NO: 2644 - protein, 20 aa, Artificial Sequence
  Synthetically generated peptide
  VARIANT (1)...(20): Xaa = Any Amino Acid
PGTCXGEIXCAYAACTXGXC

SEQ ID NO: 2645 - protein, 20 aa, Artificial Sequence
  Synthetically generated peptide
  VARIANT (1)...(20): Xaa = Any Amino Acid
PGTCXGEIXCAYAACTXGCX

SEQ ID NO: 2646 - protein, 19 aa, Artificial Sequence
  Synthetically generated peptide
  VARIANT (1)...(19): Xaa = Any Amino Acid
PGTCXGEIXCAYAACTGXC

SEQ ID NO: 2647 - protein, 20 aa, Artificial Sequence
  Synthetically generated peptide
  VARIANT (1)...(20): Xaa = Any Amino Acid
PGTCXGEIXCAYAACTGXXC

SEQ ID NO: 2648 - protein, 20 aa, Artificial Sequence
  Synthetically generated peptide
  VARIANT (1)...(20): Xaa = Any Amino Acid
PGTCXGEIXCAYAACTGXCX

SEQ ID NO: 2649 - protein, 19 aa, Artificial Sequence
  Synthetically generated peptide
  VARIANT (1)...(19): Xaa = Any Amino Acid
PGTCXGEIXCAYAACTGCX

SEQ ID NO: 2650 - protein, 20 aa, Artificial Sequence
  Synthetically generated peptide
  VARIANT (1)...(20): Xaa = Any Amino Acid
PGTCXGEIXCAYAACTGCXX

SEQ ID NO: 2651 - protein, 18 aa, Artificial Sequence
  Synthetically generated peptide
  VARIANT (1)...(18): Xaa = Any Amino Acid
PGTCXGEICXAYAACTGC

SEQ ID NO: 2652 - protein, 19 aa, Artificial Sequence
  Synthetically generated peptide
  VARIANT (1)...(19): Xaa = Any Amino Acid
PGTCXGEICXXAYAACTGC

SEQ ID NO: 2653 - protein, 20 aa, Artificial Sequence
  Synthetically generated peptide
  VARIANT (1)...(20): Xaa = Any Amino Acid
PGTCXGEICXXXAYAACTGC

SEQ ID NO: 2654 - protein, 20 aa, Artificial Sequence
  Synthetically generated peptide
  VARIANT (1)...(20): Xaa = Any Amino Acid
PGTCXGEICXXAXYAACTGC

SEQ ID NO: 2655 - protein, 20 aa, Artificial Sequence
  Synthetically generated peptide
  VARIANT (1)...(20): Xaa = Any Amino Acid
PGTCXGEICXXAYXAACTGC

SEQ ID NO: 2656 - protein, 20 aa, Artificial Sequence
  Synthetically generated peptide
  VARIANT (1)...(20): Xaa = Any Amino Acid
PGTCXGEICXXAYAXACTGC

SEQ ID NO: 2657 - protein, 20 aa, Artificial Sequence
  Synthetically generated peptide
  VARIANT (1)...(20): Xaa = Any Amino Acid
PGTCXGEICXXAYAAXCTGC

SEQ ID NO: 2658 - protein, 20 aa, Artificial Sequence
  Synthetically generated peptide
  VARIANT (1)...(20): Xaa = Any Amino Acid
PGTCXGEICXXAYAACXTGC

SEQ ID NO: 2659 - protein, 20 aa, Artificial Sequence
  Synthetically generated peptide
  VARIANT (1)...(20): Xaa = Any Amino Acid
PGTCXGEICXXAYAACTXGC

SEQ ID NO: 2660 - protein, 20 aa, Artificial Sequence
  Synthetically generated peptide
  VARIANT (1)...(20): Xaa = Any Amino Acid
PGTCXGEICXXAYAACTGXC

SEQ ID NO: 2661 - protein, 20 aa, Artificial Sequence
  Synthetically generated peptide
  VARIANT (1)...(20): Xaa = Any Amino Acid
PGTCXGEICXXAYAACTGCX

SEQ ID NO: 2662 - protein, 19 aa, Artificial Sequence
  Synthetically generated peptide
  VARIANT (1)...(19): Xaa = Any Amino Acid
PGTCXGEICXAXYAACTGC

SEQ ID NO: 2663 - protein, 20 aa, Artificial Sequence
  Synthetically generated peptide
  VARIANT (1)...(20): Xaa = Any Amino Acid
PGTCXGEICXAXXYAACTGC

SEQ ID NO: 2664 - protein, 20 aa, Artificial Sequence
  Synthetically generated peptide
  VARIANT (1)...(20): Xaa = Any Amino Acid
PGTCXGEICXAXYXAACTGC

SEQ ID NO: 2665 - protein, 20 aa, Artificial Sequence
  Synthetically generated peptide
  VARIANT (1)...(20): Xaa = Any Amino Acid
PGTCXGEICXAXYAXACTGC

SEQ ID NO: 2666 - protein, 20 aa, Artificial Sequence
  Synthetically generated peptide
  VARIANT (1)...(20): Xaa = Any Amino Acid
PGTCXGEICXAXYAAXCTGC

SEQ ID NO: 2667 - protein, 20 aa, Artificial Sequence
  Synthetically generated peptide
  VARIANT (1)...(20): Xaa = Any Amino Acid
PGTCXGEICXAXYAACXTGC

SEQ ID NO: 2668 - protein, 20 aa, Artificial Sequence
  Synthetically generated peptide
  VARIANT (1)...(20): Xaa = Any Amino Acid
PGTCXGEICXAXYAACTXGC

SEQ ID NO: 2669 - protein, 20 aa, Artificial Sequence
  Synthetically generated peptide
  VARIANT (1)...(20): Xaa = Any Amino Acid
PGTCXGEICXAXYAACTGXC

SEQ ID NO: 2670 - protein, 20 aa, Artificial Sequence
  Synthetically generated peptide
  VARIANT (1)...(20): Xaa = Any Amino Acid
PGTCXGEICXAXYAACTGCX

SEQ ID NO: 2671 - protein, 19 aa, Artificial Sequence
  Synthetically generated peptide
  VARIANT (1)...(19): Xaa = Any Amino Acid
PGTCXGEICXAYXAACTGC

SEQ ID NO: 2672 - protein, 20 aa, Artificial Sequence
  Synthetically generated peptide
  VARIANT (1)...(20): Xaa = Any Amino Acid
PGTCXGEICXAYXXAACTGC

SEQ ID NO: 2673 - protein, 20 aa, Artificial Sequence
  Synthetically generated peptide
  VARIANT (1)...(20): Xaa = Any Amino Acid
PGTCXGEICXAYXAXACTGC

SEQ ID NO: 2674 - protein, 20 aa, Artificial Sequence
  Synthetically generated peptide
  VARIANT (1)...(20): Xaa = Any Amino Acid
PGTCXGEICXAYXAAXCTGC

SEQ ID NO: 2675 - protein, 20 aa, Artificial Sequence
  Synthetically generated peptide
  VARIANT (1)...(20): Xaa = Any Amino Acid
PGTCXGEICXAYXAACXTGC

SEQ ID NO: 2676 - protein, 20 aa, Artificial Sequence
  Synthetically generated peptide
  VARIANT (1)...(20): Xaa = Any Amino Acid
PGTCXGEICXAYXAACTXGC

SEQ ID NO: 2677 - protein, 20 aa, Artificial Sequence
  Synthetically generated peptide
  VARIANT (1)...(20): Xaa = Any Amino Acid
PGTCXGEICXAYXAACTGXC

SEQ ID NO: 2678 - protein, 20 aa, Artificial Sequence
  Synthetically generated peptide
  VARIANT (1)...(20): Xaa = Any Amino Acid
PGTCXGEICXAYXAACTGCX

SEQ ID NO: 2679 - protein, 19 aa, Artificial Sequence
  Synthetically generated peptide
  VARIANT (1)...(19): Xaa = Any Amino Acid
PGTCXGEICXAYAXACTGC

SEQ ID NO: 2680 - protein, 20 aa, Artificial Sequence
  Synthetically generated peptide
  VARIANT (1)...(20): Xaa = Any Amino Acid
PGTCXGEICXAYAXXACTGC

SEQ ID NO: 2681 - protein, 20 aa, Artificial Sequence
  Synthetically generated peptide
  VARIANT (1)...(20): Xaa = Any Amino Acid
PGTCXGEICXAYAXAXCTGC

SEQ ID NO: 2682 - protein, 20 aa, Artificial Sequence
  Synthetically generated peptide
  VARIANT (1)...(20): Xaa = Any Amino Acid
PGTCXGEICXAYAXACXTGC

SEQ ID NO: 2683 - protein, 20 aa, Artificial Sequence
  Synthetically generated peptide
  VARIANT (1)...(20): Xaa = Any Amino Acid
PGTCXGEICXAYAXACTXGC

SEQ ID NO: 2684 - protein, 20 aa, Artificial Sequence
  Synthetically generated peptide
  VARIANT (1)...(20): Xaa = Any Amino Acid
PGTCXGEICXAYAXACTGXC

SEQ ID NO: 2685 - protein, 20 aa, Artificial Sequence
  Synthetically generated peptide
  VARIANT (1)...(20): Xaa = Any Amino Acid
PGTCXGEICXAYAXACTGCX

SEQ ID NO: 2686 - protein, 19 aa, Artificial Sequence
  Synthetically generated peptide
  VARIANT (1)...(19): Xaa = Any Amino Acid
PGTCXGEICXAYAAXCTGC

SEQ ID NO: 2687 - protein, 20 aa, Artificial Sequence
  Synthetically generated peptide
  VARIANT (1)...(20): Xaa = Any Amino Acid
PGTCXGEICXAYAAXXCTGC

SEQ ID NO: 2688 - protein, 20 aa, Artificial Sequence
  Synthetically generated peptide
  VARIANT (1)...(20): Xaa = Any Amino Acid
PGTCXGEICXAYAAXCXTGC

SEQ ID NO: 2689 - protein, 20 aa, Artificial Sequence
  Synthetically generated peptide
  VARIANT (1)...(20): Xaa = Any Amino Acid
PGTCXGEICXAYAAXCTXGC

SEQ ID NO: 2690 - protein, 20 aa, Artificial Sequence
  Synthetically generated peptide
  VARIANT (1)...(20): Xaa = Any Amino Acid
PGTCXGEICXAYAAXCTGXC

SEQ ID NO: 2691 - protein, 20 aa, Artificial Sequence
  Synthetically generated peptide
  VARIANT (1)...(20): Xaa = Any Amino Acid
PGTCXGEICXAYAAXCTGCX

SEQ ID NO: 2692 - protein, 19 aa, Artificial Sequence
  Synthetically generated peptide
  VARIANT (1)...(19): Xaa = Any Amino Acid
PGTCXGEICXAYAACXTGC

SEQ ID NO: 2693 - protein, 20 aa, Artificial Sequence
  Synthetically generated peptide
  VARIANT (1)...(20): Xaa = Any Amino Acid
PGTCXGEICXAYAACXXTGC

SEQ ID NO: 2694 - protein, 20 aa, Artificial Sequence
  Synthetically generated peptide
  VARIANT (1)...(20): Xaa = Any Amino Acid
PGTCXGEICXAYAACXTXGC

SEQ ID NO: 2695 - protein, 20 aa, Artificial Sequence
  Synthetically generated peptide
  VARIANT (1)...(20): Xaa = Any Amino Acid
PGTCXGEICXAYAACXTGXC

SEQ ID NO: 2696 - protein, 20 aa, Artificial Sequence
  Synthetically generated peptide
  VARIANT (1)...(20): Xaa = Any Amino Acid
PGTCXGEICXAYAACXTGCX

SEQ ID NO: 2697 - protein, 19 aa, Artificial Sequence
  Synthetically generated peptide
  VARIANT (1)...(19): Xaa = Any Amino Acid
PGTCXGEICXAYAACTXGC

SEQ ID NO: 2698 - protein, 20 aa, Artificial Sequence
  Synthetically generated peptide
  VARIANT (1)...(20): Xaa = Any Amino Acid
PGTCXGEICXAYAACTXXGC

SEQ ID NO: 2699 - protein, 20 aa, Artificial Sequence
  Synthetically generated peptide
  VARIANT (1)...(20): Xaa = Any Amino Acid
PGTCXGEICXAYAACTXGXC

SEQ ID NO: 2700 - protein, 20 aa, Artificial Sequence
  Synthetically generated peptide
  VARIANT (1)...(20): Xaa = Any Amino Acid
PGTCXGEICXAYAACTXGCX

SEQ ID NO: 2701 - protein, 19 aa, Artificial Sequence
  Synthetically generated peptide
  VARIANT (1)...(19): Xaa = Any Amino Acid
PGTCXGEICXAYAACTGXC

SEQ ID NO: 2702 - protein, 20 aa, Artificial Sequence
  Synthetically generated peptide
  VARIANT (1)...(20): Xaa = Any Amino Acid
PGTCXGEICXAYAACTGXXC

SEQ ID NO: 2703 - protein, 20 aa, Artificial Sequence
  Synthetically generated peptide
  VARIANT (1)...(20): Xaa = Any Amino Acid
PGTCXGEICXAYAACTGXCX

SEQ ID NO: 2704 - protein, 19 aa, Artificial Sequence
  Synthetically generated peptide
  VARIANT (1)...(19): Xaa = Any Amino Acid
PGTCXGEICXAYAACTGCX

SEQ ID NO: 2705 - protein, 20 aa, Artificial Sequence
  Synthetically generated peptide
  VARIANT (1)...(20): Xaa = Any Amino Acid
PGTCXGEICXAYAACTGCXX

SEQ ID NO: 2706 - protein, 18 aa, Artificial Sequence
  Synthetically generated peptide
  VARIANT (1)...(18): Xaa = Any Amino Acid
PGTCXGEICAXYAACTGC

SEQ ID NO: 2707 - protein, 19 aa, Artificial Sequence
  Synthetically generated peptide
  VARIANT (1)...(19): Xaa = Any Amino Acid
PGTCXGEICAXXYAACTGC

SEQ ID NO: 2708 - protein, 20 aa, Artificial Sequence
  Synthetically generated peptide
  VARIANT (1)...(20): Xaa = Any Amino Acid
PGTCXGEICAXXXYAACTGC

SEQ ID NO: 2709 - protein, 20 aa, Artificial Sequence
  Synthetically generated peptide
  VARIANT (1)...(20): Xaa = Any Amino Acid
PGTCXGEICAXXYXAACTGC

SEQ ID NO: 2710 - protein, 20 aa, Artificial Sequence
  Synthetically generated peptide
  VARIANT (1)...(20): Xaa = Any Amino Acid
PGTCXGEICAXXYAXACTGC

SEQ ID NO: 2711 - protein, 20 aa, Artificial Sequence
  Synthetically generated peptide
  VARIANT (1)...(20): Xaa = Any Amino Acid
PGTCXGEICAXXYAAXCTGC

SEQ ID NO: 2712 - protein, 20 aa, Artificial Sequence
  Synthetically generated peptide
  VARIANT (1)...(20): Xaa = Any Amino Acid
PGTCXGEICAXXYAACXTGC

SEQ ID NO: 2713 - protein, 20 aa, Artificial Sequence
  Synthetically generated peptide
  VARIANT (1)...(20): Xaa = Any Amino Acid
PGTCXGEICAXXYAACTXGC

SEQ ID NO: 2714 - protein, 20 aa, Artificial Sequence
  Synthetically generated peptide
  VARIANT (1)...(20): Xaa = Any Amino Acid
PGTCXGEICAXXYAACTGXC

SEQ ID NO: 2715 - protein, 20 aa, Artificial Sequence
  Synthetically generated peptide
  VARIANT (1)...(20): Xaa = Any Amino Acid
PGTCXGEICAXXYAACTGCX

SEQ ID NO: 2716 - protein, 19 aa, Artificial Sequence
  Synthetically generated peptide
  VARIANT (1)...(19): Xaa = Any Amino Acid
PGTCXGEICAXYXAACTGC

SEQ ID NO: 2717 - protein, 20 aa, Artificial Sequence
  Synthetically generated peptide
  VARIANT (1)...(20): Xaa = Any Amino Acid
PGTCXGEICAXYXXAACTGC

SEQ ID NO: 2718 - protein, 20 aa, Artificial Sequence
  Synthetically generated peptide
  VARIANT (1)...(20): Xaa = Any Amino Acid
PGTCXGEICAXYXAXACTGC

SEQ ID NO: 2719 - protein, 20 aa, Artificial Sequence
  Synthetically generated peptide
  VARIANT (1)...(20): Xaa = Any Amino Acid
PGTCXGEICAXYXAAXCTGC

SEQ ID NO: 2720 - protein, 20 aa, Artificial Sequence
  Synthetically generated peptide
  VARIANT (1)...(20): Xaa = Any Amino Acid
PGTCXGEICAXYXAACXTGC

SEQ ID NO: 2721 - protein, 20 aa, Artificial Sequence
  Synthetically generated peptide
  VARIANT (1)...(20): Xaa = Any Amino Acid
PGTCXGEICAXYXAACTXGC

SEQ ID NO: 2722 - protein, 20 aa, Artificial Sequence
  Synthetically generated peptide
  VARIANT (1)...(20): Xaa = Any Amino Acid
PGTCXGEICAXYXAACTGXC

SEQ ID NO: 2723 - protein, 20 aa, Artificial Sequence
  Synthetically generated peptide
  VARIANT (1)...(20): Xaa = Any Amino Acid
PGTCXGEICAXYXAACTGCX

SEQ ID NO: 2724 - protein, 19 aa, Artificial Sequence
  Synthetically generated peptide
  VARIANT (1)...(19): Xaa = Any Amino Acid
PGTCXGEICAXYAXACTGC

SEQ ID NO: 2725 - protein, 20 aa, Artificial Sequence
  Synthetically generated peptide
  VARIANT (1)...(20): Xaa = Any Amino Acid
PGTCXGEICAXYAXXACTGC

SEQ ID NO: 2726 - protein, 20 aa, Artificial Sequence
  Synthetically generated peptide
  VARIANT (1)...(20): Xaa = Any Amino Acid
PGTCXGEICAXYAXAXCTGC

SEQ ID NO: 2727 - protein, 20 aa, Artificial Sequence
  Synthetically generated peptide
  VARIANT (1)...(20): Xaa = Any Amino Acid
PGTCXGEICAXYAXACXTGC

SEQ ID NO: 2728 - protein, 20 aa, Artificial Sequence
  Synthetically generated peptide
  VARIANT (1)...(20): Xaa = Any Amino Acid
PGTCXGEICAXYAXACTXGC

SEQ ID NO: 2729 - protein, 20 aa, Artificial Sequence
  Synthetically generated peptide
  VARIANT (1)...(20): Xaa = Any Amino Acid
PGTCXGEICAXYAXACTGXC

SEQ ID NO: 2730 - protein, 20 aa, Artificial Sequence
  Synthetically generated peptide
  VARIANT (1)...(20): Xaa = Any Amino Acid
PGTCXGEICAXYAXACTGCX

SEQ ID NO: 2731 - protein, 19 aa, Artificial Sequence
  Synthetically generated peptide
  VARIANT (1)...(19): Xaa = Any Amino Acid
PGTCXGEICAXYAAXCTGC

SEQ ID NO: 2732 - protein, 20 aa, Artificial Sequence
  Synthetically generated peptide
  VARIANT (1)...(20): Xaa = Any Amino Acid
PGTCXGEICAXYAAXXCTGC

SEQ ID NO: 2733 - protein, 20 aa, Artificial Sequence
  Synthetically generated peptide
  VARIANT (1)...(20): Xaa = Any Amino Acid
PGTCXGEICAXYAAXCXTGC

SEQ ID NO: 2734 - protein, 20 aa, Artificial Sequence
  Synthetically generated peptide
  VARIANT (1)...(20): Xaa = Any Amino Acid
PGTCXGEICAXYAAXCTXGC

SEQ ID NO: 2735 - protein, 20 aa, Artificial Sequence
  Synthetically generated peptide
  VARIANT (1)...(20): Xaa = Any Amino Acid
PGTCXGEICAXYAAXCTGXC

SEQ ID NO: 2736 - protein, 20 aa, Artificial Sequence
  Synthetically generated peptide
  VARIANT (1)...(20): Xaa = Any Amino Acid
PGTCXGEICAXYAAXCTGCX

SEQ ID NO: 2737 - protein, 19 aa, Artificial Sequence
  Synthetically generated peptide
  VARIANT (1)...(19): Xaa = Any Amino Acid
PGTCXGEICAXYAACXTGC

SEQ ID NO: 2738 - protein, 20 aa, Artificial Sequence
  Synthetically generated peptide
  VARIANT (1)...(20): Xaa = Any Amino Acid
PGTCXGEICAXYAACXXTGC

SEQ ID NO: 2739 - protein, 20 aa, Artificial Sequence
  Synthetically generated peptide
  VARIANT (1)...(20): Xaa = Any Amino Acid
PGTCXGEICAXYAACXTXGC

SEQ ID NO: 2740 - protein, 20 aa, Artificial Sequence
  Synthetically generated peptide
  VARIANT (1)...(20): Xaa = Any Amino Acid
PGTCXGEICAXYAACXTGXC

SEQ ID NO: 2741 - protein, 20 aa, Artificial Sequence
  Synthetically generated peptide
  VARIANT (1)...(20): Xaa = Any Amino Acid
PGTCXGEICAXYAACXTGCX

SEQ ID NO: 2742 - protein, 19 aa, Artificial Sequence
  Synthetically generated peptide
  VARIANT (1)...(19): Xaa = Any Amino Acid
PGTCXGEICAXYAACTXGC

SEQ ID NO: 2743 - protein, 20 aa, Artificial Sequence
  Synthetically generated peptide
  VARIANT (1)...(20): Xaa = Any Amino Acid
PGTCXGEICAXYAACTXXGC

SEQ ID NO: 2744 - protein, 20 aa, Artificial Sequence
  Synthetically generated peptide
  VARIANT (1)...(20): Xaa = Any Amino Acid
PGTCXGEICAXYAACTXGXC

SEQ ID NO: 2745 - protein, 20 aa, Artificial Sequence
  Synthetically generated peptide
  VARIANT (1)...(20): Xaa = Any Amino Acid
PGTCXGEICAXYAACTXGCX

SEQ ID NO: 2746 - protein, 19 aa, Artificial Sequence
  Synthetically generated peptide
  VARIANT (1)...(19): Xaa = Any Amino Acid
PGTCXGEICAXYAACTGXC

SEQ ID NO: 2747 - protein, 20 aa, Artificial Sequence
  Synthetically generated peptide
  VARIANT (1)...(20): Xaa = Any Amino Acid
PGTCXGEICAXYAACTGXXC

SEQ ID NO: 2748 - protein, 20 aa, Artificial Sequence
  Synthetically generated peptide
  VARIANT (1)...(20): Xaa = Any Amino Acid
PGTCXGEICAXYAACTGXCX

SEQ ID NO: 2749 - protein, 19 aa, Artificial Sequence
  Synthetically generated peptide
  VARIANT (1)...(19): Xaa = Any Amino Acid
PGTCXGEICAXYAACTGCX

SEQ ID NO: 2750 - protein, 20 aa, Artificial Sequence
  Synthetically generated peptide
  VARIANT (1)...(20): Xaa = Any Amino Acid
PGTCXGEICAXYAACTGCXX

SEQ ID NO: 2751 - protein, 18 aa, Artificial Sequence
  Synthetically generated peptide
  VARIANT (1)...(18): Xaa = Any Amino Acid
PGTCXGEICAYXAACTGC

SEQ ID NO: 2752 - protein, 19 aa, Artificial Sequence
  Synthetically generated peptide
  VARIANT (1)...(19): Xaa = Any Amino Acid
PGTCXGEICAYXXAACTGC

SEQ ID NO: 2753 - protein, 20 aa, Artificial Sequence
  Synthetically generated peptide
  VARIANT (1)...(20): Xaa = Any Amino Acid
PGTCXGEICAYXXXAACTGC

SEQ ID NO: 2754 - protein, 20 aa, Artificial Sequence
  Synthetically generated peptide
  VARIANT (1)...(20): Xaa = Any Amino Acid
PGTCXGEICAYXXAXACTGC

SEQ ID NO: 2755 - protein, 20 aa, Artificial Sequence
  Synthetically generated peptide
  VARIANT (1)...(20): Xaa = Any Amino Acid
PGTCXGEICAYXXAAXCTGC

SEQ ID NO: 2756 - protein, 20 aa, Artificial Sequence
  Synthetically generated peptide
  VARIANT (1)...(20): Xaa = Any Amino Acid
PGTCXGEICAYXXAACXTGC

SEQ ID NO: 2757 - protein, 20 aa, Artificial Sequence
  Synthetically generated peptide
  VARIANT (1)...(20): Xaa = Any Amino Acid
PGTCXGEICAYXXAACTXGC

SEQ ID NO: 2758 - protein, 20 aa, Artificial Sequence
  Synthetically generated peptide
  VARIANT (1)...(20): Xaa = Any Amino Acid
PGTCXGEICAYXXAACTGXC

SEQ ID NO: 2759 - protein, 20 aa, Artificial Sequence
  Synthetically generated peptide
  VARIANT (1)...(20): Xaa = Any Amino Acid
PGTCXGEICAYXXAACTGCX

SEQ ID NO: 2760 - protein, 19 aa, Artificial Sequence
  Synthetically generated peptide
  VARIANT (1)...(19): Xaa = Any Amino Acid
PGTCXGEICAYXAXACTGC

SEQ ID NO: 2761 - protein, 20 aa, Artificial Sequence
  Synthetically generated peptide
  VARIANT (1)...(20): Xaa = Any Amino Acid
PGTCXGEICAYXAXXACTGC

SEQ ID NO: 2762 - protein, 20 aa, Artificial Sequence
  Synthetically generated peptide
  VARIANT (1)...(20): Xaa = Any Amino Acid
PGTCXGEICAYXAXAXCTGC

SEQ ID NO: 2763 - protein, 20 aa, Artificial Sequence
  Synthetically generated peptide
  VARIANT (1)...(20): Xaa = Any Amino Acid
PGTCXGEICAYXAXACXTGC

SEQ ID NO: 2764 - protein, 20 aa, Artificial Sequence
  Synthetically generated peptide
  VARIANT (1)...(20): Xaa = Any Amino Acid
PGTCXGEICAYXAXACTXGC

SEQ ID NO: 2765 - protein, 20 aa, Artificial Sequence
  Synthetically generated peptide
  VARIANT (1)...(20): Xaa = Any Amino Acid
PGTCXGEICAYXAXACTGXC

SEQ ID NO: 2766 - protein, 20 aa, Artificial Sequence
  Synthetically generated peptide
  VARIANT (1)...(20): Xaa = Any Amino Acid
PGTCXGEICAYXAXACTGCX

SEQ ID NO: 2767 - protein, 19 aa, Artificial Sequence
  Synthetically generated peptide
  VARIANT (1)...(19): Xaa = Any Amino Acid
PGTCXGEICAYXAAXCTGC

SEQ ID NO: 2768 - protein, 20 aa, Artificial Sequence
  Synthetically generated peptide
  VARIANT (1)...(20): Xaa = Any Amino Acid
PGTCXGEICAYXAAXXCTGC

SEQ ID NO: 2769 - protein, 20 aa, Artificial Sequence
  Synthetically generated peptide
  VARIANT (1)...(20): Xaa = Any Amino Acid
PGTCXGEICAYXAAXCXTGC

SEQ ID NO: 2770 - protein, 20 aa, Artificial Sequence
  Synthetically generated peptide
  VARIANT (1)...(20): Xaa = Any Amino Acid
PGTCXGEICAYXAAXCTXGC

SEQ ID NO: 2771 - protein, 20 aa, Artificial Sequence
  Synthetically generated peptide
  VARIANT (1)...(20): Xaa = Any Amino Acid
PGTCXGEICAYXAAXCTGXC

SEQ ID NO: 2772 - protein, 20 aa, Artificial Sequence
  Synthetically generated peptide
  VARIANT (1)...(20): Xaa = Any Amino Acid
PGTCXGEICAYXAAXCTGCX

SEQ ID NO: 2773 - protein, 19 aa, Artificial Sequence
  Synthetically generated peptide
  VARIANT (1)...(19): Xaa = Any Amino Acid
PGTCXGEICAYXAACXTGC

SEQ ID NO: 2774 - protein, 20 aa, Artificial Sequence
  Synthetically generated peptide
  VARIANT (1)...(20): Xaa = Any Amino Acid
PGTCXGEICAYXAACXXTGC

SEQ ID NO: 2775 - protein, 20 aa, Artificial Sequence
  Synthetically generated peptide
  VARIANT (1)...(20): Xaa = Any Amino Acid
PGTCXGEICAYXAACXTXGC

SEQ ID NO: 2776 - protein, 20 aa, Artificial Sequence
  Synthetically generated peptide
  VARIANT (1)...(20): Xaa = Any Amino Acid
PGTCXGEICAYXAACXTGXC

SEQ ID NO: 2777 - protein, 20 aa, Artificial Sequence
  Synthetically generated peptide
  VARIANT (1)...(20): Xaa = Any Amino Acid
PGTCXGEICAYXAACXTGCX

SEQ ID NO: 2778 - protein, 19 aa, Artificial Sequence
  Synthetically generated peptide
  VARIANT (1)...(19): Xaa = Any Amino Acid
PGTCXGEICAYXAACTXGC

SEQ ID NO: 2779 - protein, 20 aa, Artificial Sequence
  Synthetically generated peptide
  VARIANT (1)...(20): Xaa = Any Amino Acid
PGTCXGEICAYXAACTXXGC

SEQ ID NO: 2780 - protein, 20 aa, Artificial Sequence
  Synthetically generated peptide
  VARIANT (1)...(20): Xaa = Any Amino Acid
PGTCXGEICAYXAACTXGXC

SEQ ID NO: 2781 - protein, 20 aa, Artificial Sequence
  Synthetically generated peptide
  VARIANT (1)...(20): Xaa = Any Amino Acid
PGTCXGEICAYXAACTXGCX

SEQ ID NO: 2782 - protein, 19 aa, Artificial Sequence
  Synthetically generated peptide
  VARIANT (1)...(19): Xaa = Any Amino Acid
PGTCXGEICAYXAACTGXC

SEQ ID NO: 2783 - protein, 20 aa, Artificial Sequence
  Synthetically generated peptide
  VARIANT (1)...(20): Xaa = Any Amino Acid
PGTCXGEICAYXAACTGXXC

SEQ ID NO: 2784 - protein, 20 aa, Artificial Sequence
  Synthetically generated peptide
  VARIANT (1)...(20): Xaa = Any Amino Acid
PGTCXGEICAYXAACTGXCX

SEQ ID NO: 2785 - protein, 19 aa, Artificial Sequence
  Synthetically generated peptide
  VARIANT (1)...(19): Xaa = Any Amino Acid
PGTCXGEICAYXAACTGCX

SEQ ID NO: 2786 - protein, 20 aa, Artificial Sequence
  Synthetically generated peptide
  VARIANT (1)...(20): Xaa = Any Amino Acid
PGTCXGEICAYXAACTGCXX

SEQ ID NO: 2787 - protein, 18 aa, Artificial Sequence
  Synthetically generated peptide
  VARIANT (1)...(18): Xaa = Any Amino Acid
PGTCXGEICAYAXACTGC

SEQ ID NO: 2788 - protein, 19 aa, Artificial Sequence
  Synthetically generated peptide
  VARIANT (1)...(19): Xaa = Any Amino Acid
PGTCXGEICAYAXXACTGC

SEQ ID NO: 2789 - protein, 20 aa, Artificial Sequence
  Synthetically generated peptide
  VARIANT (1)...(20): Xaa = Any Amino Acid
PGTCXGEICAYAXXXACTGC

SEQ ID NO: 2790 - protein, 20 aa, Artificial Sequence
  Synthetically generated peptide
  VARIANT (1)...(20): Xaa = Any Amino Acid
PGTCXGEICAYAXXAXCTGC

SEQ ID NO: 2791 - protein, 20 aa, Artificial Sequence
  Synthetically generated peptide
  VARIANT (1)...(20): Xaa = Any Amino Acid
PGTCXGEICAYAXXACXTGC

SEQ ID NO: 2792 - protein, 20 aa, Artificial Sequence
  Synthetically generated peptide
  VARIANT (1)...(20): Xaa = Any Amino Acid
PGTCXGEICAYAXXACTXGC

SEQ ID NO: 2793 - protein, 20 aa, Artificial Sequence
  Synthetically generated peptide
  VARIANT (1)...(20): Xaa = Any Amino Acid
PGTCXGEICAYAXXACTGXC

SEQ ID NO: 2794 - protein, 20 aa, Artificial Sequence
  Synthetically generated peptide
  VARIANT (1)...(20): Xaa = Any Amino Acid
PGTCXGEICAYAXXACTGCX

SEQ ID NO: 2795 - protein, 19 aa, Artificial Sequence
  Synthetically generated peptide
  VARIANT (1)...(19): Xaa = Any Amino Acid
PGTCXGEICAYAXAXCTGC

SEQ ID NO: 2796 - protein, 20 aa, Artificial Sequence
  Synthetically generated peptide
  VARIANT (1)...(20): Xaa = Any Amino Acid
PGTCXGEICAYAXAXXCTGC

SEQ ID NO: 2797 - protein, 20 aa, Artificial Sequence
  Synthetically generated peptide
  VARIANT (1)...(20): Xaa = Any Amino Acid
PGTCXGEICAYAXAXCXTGC

SEQ ID NO: 2798 - protein, 20 aa, Artificial Sequence
  Synthetically generated peptide
  VARIANT (1)...(20): Xaa = Any Amino Acid
PGTCXGEICAYAXAXCTXGC

SEQ ID NO: 2799 - protein, 20 aa, Artificial Sequence
  Synthetically generated peptide
  VARIANT (1)...(20): Xaa = Any Amino Acid
PGTCXGEICAYAXAXCTGXC

SEQ ID NO: 2800 - protein, 20 aa, Artificial Sequence
  Synthetically generated peptide
  VARIANT (1)...(20): Xaa = Any Amino Acid
PGTCXGEICAYAXAXCTGCX

SEQ ID NO: 2801 - protein, 19 aa, Artificial Sequence
  Synthetically generated peptide
  VARIANT (1)...(19): Xaa = Any Amino Acid
PGTCXGEICAYAXACXTGC

SEQ ID NO: 2802 - protein, 20 aa, Artificial Sequence
  Synthetically generated peptide
  VARIANT (1)...(20): Xaa = Any Amino Acid
PGTCXGEICAYAXACXXTGC

SEQ ID NO: 2803 - protein, 20 aa, Artificial Sequence
  Synthetically generated peptide
  VARIANT (1)...(20): Xaa = Any Amino Acid
PGTCXGEICAYAXACXTXGC

SEQ ID NO: 2804 - protein, 20 aa, Artificial Sequence
  Synthetically generated peptide
  VARIANT (1)...(20): Xaa = Any Amino Acid
PGTCXGEICAYAXACXTGXC

SEQ ID NO: 2805 - protein, 20 aa, Artificial Sequence
  Synthetically generated peptide
  VARIANT (1)...(20): Xaa = Any Amino Acid
PGTCXGEICAYAXACXTGCX

SEQ ID NO: 2806 - protein, 19 aa, Artificial Sequence
  Synthetically generated peptide
  VARIANT (1)...(19): Xaa = Any Amino Acid
PGTCXGEICAYAXACTXGC

SEQ ID NO: 2807 - protein, 20 aa, Artificial Sequence
  Synthetically generated peptide
  VARIANT (1)...(20): Xaa = Any Amino Acid
PGTCXGEICAYAXACTXXGC

SEQ ID NO: 2808 - protein, 20 aa, Artificial Sequence
  Synthetically generated peptide
  VARIANT (1)...(20): Xaa = Any Amino Acid
PGTCXGEICAYAXACTXGXC

SEQ ID NO: 2809 - protein, 20 aa, Artificial Sequence
  Synthetically generated peptide
  VARIANT (1)...(20): Xaa = Any Amino Acid
PGTCXGEICAYAXACTXGCX

SEQ ID NO: 2810 - protein, 19 aa, Artificial Sequence
  Synthetically generated peptide
  VARIANT (1)...(19): Xaa = Any Amino Acid
PGTCXGEICAYAXACTGXC

SEQ ID NO: 2811 - protein, 20 aa, Artificial Sequence
  Synthetically generated peptide
  VARIANT (1)...(20): Xaa = Any Amino Acid
PGTCXGEICAYAXACTGXXC

SEQ ID NO: 2812 - protein, 20 aa, Artificial Sequence
  Synthetically generated peptide
  VARIANT (1)...(20): Xaa = Any Amino Acid
PGTCXGEICAYAXACTGXCX

SEQ ID NO: 2813 - protein, 19 aa, Artificial Sequence
  Synthetically generated peptide
  VARIANT (1)...(19): Xaa = Any Amino Acid
PGTCXGEICAYAXACTGCX

SEQ ID NO: 2814 - protein, 20 aa, Artificial Sequence
  Synthetically generated peptide
  VARIANT (1)...(20): Xaa = Any Amino Acid
PGTCXGEICAYAXACTGCXX

SEQ ID NO: 2815 - protein, 18 aa, Artificial Sequence
  Synthetically generated peptide
  VARIANT (1)...(18): Xaa = Any Amino Acid
PGTCXGEICAYAAXCTGC

SEQ ID NO: 2816 - protein, 19 aa, Artificial Sequence
  Synthetically generated peptide
  VARIANT (1)...(19): Xaa = Any Amino Acid
PGTCXGEICAYAAXXCTGC

SEQ ID NO: 2817 - protein, 20 aa, Artificial Sequence
  Synthetically generated peptide
  VARIANT (1)...(20): Xaa = Any Amino Acid
PGTCXGEICAYAAXXXCTGC

SEQ ID NO: 2818 - protein, 20 aa, Artificial Sequence
  Synthetically generated peptide
  VARIANT (1)...(20): Xaa = Any Amino Acid
PGTCXGEICAYAAXXCXTGC

SEQ ID NO: 2819 - protein, 20 aa, Artificial Sequence
  Synthetically generated peptide
  VARIANT (1)...(20): Xaa = Any Amino Acid
PGTCXGEICAYAAXXCTXGC

SEQ ID NO: 2820 - protein, 20 aa, Artificial Sequence
  Synthetically generated peptide
  VARIANT (1)...(20): Xaa = Any Amino Acid
PGTCXGEICAYAAXXCTGXC

SEQ ID NO: 2821 - protein, 20 aa, Artificial Sequence
  Synthetically generated peptide
  VARIANT (1)...(20): Xaa = Any Amino Acid
PGTCXGEICAYAAXXCTGCX

SEQ ID NO: 2822 - protein, 19 aa, Artificial Sequence
  Synthetically generated peptide
  VARIANT (1)...(19): Xaa = Any Amino Acid
PGTCXGEICAYAAXCXTGC

SEQ ID NO: 2823 - protein, 20 aa, Artificial Sequence
  Synthetically generated peptide
  VARIANT (1)...(20): Xaa = Any Amino Acid
PGTCXGEICAYAAXCXXTGC

SEQ ID NO: 2824 - protein, 20 aa, Artificial Sequence
  Synthetically generated peptide
  VARIANT (1)...(20): Xaa = Any Amino Acid
PGTCXGEICAYAAXCXTXGC

SEQ ID NO: 2825 - protein, 20 aa, Artificial Sequence
  Synthetically generated peptide
  VARIANT (1)...(20): Xaa = Any Amino Acid
PGTCXGEICAYAAXCXTGXC

SEQ ID NO: 2826 - protein, 20 aa, Artificial Sequence
  Synthetically generated peptide
  VARIANT (1)...(20): Xaa = Any Amino Acid
PGTCXGEICAYAAXCXTGCX

SEQ ID NO: 2827 - protein, 19 aa, Artificial Sequence
  Synthetically generated peptide
  VARIANT (1)...(19): Xaa = Any Amino Acid
PGTCXGEICAYAAXCTXGC

SEQ ID NO: 2828 - protein, 20 aa, Artificial Sequence
  Synthetically generated peptide
  VARIANT (1)...(20): Xaa = Any Amino Acid
PGTCXGEICAYAAXCTXXGC

SEQ ID NO: 2829 - protein, 20 aa, Artificial Sequence
  Synthetically generated peptide
  VARIANT (1)...(20): Xaa = Any Amino Acid
PGTCXGEICAYAAXCTXGXC

SEQ ID NO: 2830 - protein, 20 aa, Artificial Sequence
  Synthetically generated peptide
  VARIANT (1)...(20): Xaa = Any Amino Acid
PGTCXGEICAYAAXCTXGCX

SEQ ID NO: 2831 - protein, 19 aa, Artificial Sequence
  Synthetically generated peptide
  VARIANT (1)...(19): Xaa = Any Amino Acid
PGTCXGEICAYAAXCTGXC

SEQ ID NO: 2832 - protein, 20 aa, Artificial Sequence
  Synthetically generated peptide
  VARIANT (1)...(20): Xaa = Any Amino Acid
PGTCXGEICAYAAXCTGXXC

SEQ ID NO: 2833 - protein, 20 aa, Artificial Sequence
  Synthetically generated peptide
  VARIANT (1)...(20): Xaa = Any Amino Acid
PGTCXGEICAYAAXCTGXCX

SEQ ID NO: 2834 - protein, 19 aa, Artificial Sequence
  Synthetically generated peptide
  VARIANT (1)...(19): Xaa = Any Amino Acid
PGTCXGEICAYAAXCTGCX

SEQ ID NO: 2835 - protein, 20 aa, Artificial Sequence
  Synthetically generated peptide
  VARIANT (1)...(20): Xaa = Any Amino Acid
PGTCXGEICAYAAXCTGCXX

SEQ ID NO: 2836 - protein, 18 aa, Artificial Sequence
  Synthetically generated peptide
  VARIANT (1)...(18): Xaa = Any Amino Acid
PGTCXGEICAYAACXTGC

SEQ ID NO: 2837 - protein, 19 aa, Artificial Sequence
  Synthetically generated peptide
  VARIANT (1)...(19): Xaa = Any Amino Acid
PGTCXGEICAYAACXXTGC

SEQ ID NO: 2838 - protein, 20 aa, Artificial Sequence
  Synthetically generated peptide
  VARIANT (1)...(20): Xaa = Any Amino Acid
PGTCXGEICAYAACXXXTGC

SEQ ID NO: 2839 - protein, 20 aa, Artificial Sequence
  Synthetically generated peptide
  VARIANT (1)...(20): Xaa = Any Amino Acid
PGTCXGEICAYAACXXTXGC

SEQ ID NO: 2840 - protein, 20 aa, Artificial Sequence
  Synthetically generated peptide
  VARIANT (1)...(20): Xaa = Any Amino Acid
PGTCXGEICAYAACXXTGXC

SEQ ID NO: 2841 - protein, 20 aa, Artificial Sequence
  Synthetically generated peptide
  VARIANT (1)...(20): Xaa = Any Amino Acid
PGTCXGEICAYAACXXTGCX

SEQ ID NO: 2842 - protein, 19 aa, Artificial Sequence
  Synthetically generated peptide
  VARIANT (1)...(19): Xaa = Any Amino Acid
PGTCXGEICAYAACXTXGC

SEQ ID NO: 2843 - protein, 20 aa, Artificial Sequence
  Synthetically generated peptide
  VARIANT (1)...(20): Xaa = Any Amino Acid
PGTCXGEICAYAACXTXXGC

SEQ ID NO: 2844 - protein, 20 aa, Artificial Sequence
  Synthetically generated peptide
  VARIANT (1)...(20): Xaa = Any Amino Acid
PGTCXGEICAYAACXTXGXC

SEQ ID NO: 2845 - protein, 20 aa, Artificial Sequence
  Synthetically generated peptide
  VARIANT (1)...(20): Xaa = Any Amino Acid
PGTCXGEICAYAACXTXGCX

SEQ ID NO: 2846 - protein, 19 aa, Artificial Sequence
  Synthetically generated peptide
  VARIANT (1)...(19): Xaa = Any Amino Acid
PGTCXGEICAYAACXTGXC

SEQ ID NO: 2847 - protein, 20 aa, Artificial Sequence
  Synthetically generated peptide
  VARIANT (1)...(20): Xaa = Any Amino Acid
PGTCXGEICAYAACXTGXXC

SEQ ID NO: 2848 - protein, 20 aa, Artificial Sequence
  Synthetically generated peptide
  VARIANT (1)...(20): Xaa = Any Amino Acid
PGTCXGEICAYAACXTGXCX

SEQ ID NO: 2849 - protein, 19 aa, Artificial Sequence
  Synthetically generated peptide
  VARIANT (1)...(19): Xaa = Any Amino Acid
PGTCXGEICAYAACXTGCX

SEQ ID NO: 2850 - protein, 20 aa, Artificial Sequence
  Synthetically generated peptide
  VARIANT (1)...(20): Xaa = Any Amino Acid
PGTCXGEICAYAACXTGCXX

SEQ ID NO: 2851 - protein, 18 aa, Artificial Sequence
  Synthetically generated peptide
  VARIANT (1)...(18): Xaa = Any Amino Acid
PGTCXGEICAYAACTXGC

SEQ ID NO: 2852 - protein, 19 aa, Artificial Sequence
  Synthetically generated peptide
  VARIANT (1)...(19): Xaa = Any Amino Acid
PGTCXGEICAYAACTXXGC

SEQ ID NO: 2853 - protein, 20 aa, Artificial Sequence
  Synthetically generated peptide
  VARIANT (1)...(20): Xaa = Any Amino Acid
PGTCXGEICAYAACTXXXGC

SEQ ID NO: 2854 - protein, 20 aa, Artificial Sequence
  Synthetically generated peptide
  VARIANT (1)...(20): Xaa = Any Amino Acid
PGTCXGEICAYAACTXXGXC

SEQ ID NO: 2855 - protein, 20 aa, Artificial Sequence
  Synthetically generated peptide
  VARIANT (1)...(20): Xaa = Any Amino Acid
PGTCXGEICAYAACTXXGCX

SEQ ID NO: 2856 - protein, 19 aa, Artificial Sequence
  Synthetically generated peptide
  VARIANT (1)...(19): Xaa = Any Amino Acid
PGTCXGEICAYAACTXGXC

SEQ ID NO: 2857 - protein, 20 aa, Artificial Sequence
  Synthetically generated peptide
  VARIANT (1)...(20): Xaa = Any Amino Acid
PGTCXGEICAYAACTXGXXC

SEQ ID NO: 2858 - protein, 20 aa, Artificial Sequence
  Synthetically generated peptide
  VARIANT (1)...(20): Xaa = Any Amino Acid
PGTCXGEICAYAACTXGXCX

SEQ ID NO: 2859 - protein, 19 aa, Artificial Sequence
  Synthetically generated peptide
  VARIANT (1)...(19): Xaa = Any Amino Acid
PGTCXGEICAYAACTXGCX

SEQ ID NO: 2860 - protein, 20 aa, Artificial Sequence
  Synthetically generated peptide
  VARIANT (1)...(20): Xaa = Any Amino Acid
PGTCXGEICAYAACTXGCXX

SEQ ID NO: 2861 - protein, 18 aa, Artificial Sequence
  Synthetically generated peptide
  VARIANT (1)...(18): Xaa = Any Amino Acid
PGTCXGEICAYAACTGXC

SEQ ID NO: 2862 - protein, 19 aa, Artificial Sequence
  Synthetically generated peptide
  VARIANT (1)...(19): Xaa = Any Amino Acid
PGTCXGEICAYAACTGXXC

SEQ ID NO: 2863 - protein, 20 aa, Artificial Sequence
  Synthetically generated peptide
  VARIANT (1)...(20): Xaa = Any Amino Acid
PGTCXGEICAYAACTGXXXC

SEQ ID NO: 2864 - protein, 20 aa, Artificial Sequence
  Synthetically generated peptide
  VARIANT (1)...(20): Xaa = Any Amino Acid
PGTCXGEICAYAACTGXXCX

SEQ ID NO: 2865 - protein, 19 aa, Artificial Sequence
  Synthetically generated peptide
  VARIANT (1)...(19): Xaa = Any Amino Acid
PGTCXGEICAYAACTGXCX

SEQ ID NO: 2866 - protein, 20 aa, Artificial Sequence
  Synthetically generated peptide
  VARIANT (1)...(20): Xaa = Any Amino Acid
PGTCXGEICAYAACTGXCXX

SEQ ID NO: 2867 - protein, 18 aa, Artificial Sequence
  Synthetically generated peptide
  VARIANT (1)...(18): Xaa = Any Amino Acid
PGTCXGEICAYAACTGCX

SEQ ID NO: 2868 - protein, 19 aa, Artificial Sequence
  Synthetically generated peptide
  VARIANT (1)...(19): Xaa = Any Amino Acid
PGTCXGEICAYAACTGCXX

SEQ ID NO: 2869 - protein, 20 aa, Artificial Sequence
  Synthetically generated peptide
  VARIANT (1)...(20): Xaa = Any Amino Acid
PGTCXGEICAYAACTGCXXX

SEQ ID NO: 2870 - protein, 17 aa, Artificial Sequence
  Synthetically generated peptide
  VARIANT (1)...(17): Xaa = Any Amino Acid
PGTCGXEICAYAACTGC

SEQ ID NO: 2871 - protein, 18 aa, Artificial Sequence
  Synthetically generated peptide
  VARIANT (1)...(18): Xaa = Any Amino Acid
PGTCGXXEICAYAACTGC

SEQ ID NO: 2872 - protein, 19 aa, Artificial Sequence
  Synthetically generated peptide
  VARIANT (1)...(19): Xaa = Any Amino Acid
PGTCGXXXEICAYAACTGC

SEQ ID NO: 2873 - protein, 20 aa, Artificial Sequence
  Synthetically generated peptide
  VARIANT (1)...(20): Xaa = Any Amino Acid
PGTCGXXXXEICAYAACTGC

SEQ ID NO: 2874 - protein, 20 aa, Artificial Sequence
  Synthetically generated peptide
  VARIANT (1)...(20): Xaa = Any Amino Acid
PGTCGXXXEXICAYAACTGC

SEQ ID NO: 2875 - protein, 20 aa, Artificial Sequence
  Synthetically generated peptide
  VARIANT (1)...(20): Xaa = Any Amino Acid
PGTCGXXXEIXCAYAACTGC

SEQ ID NO: 2876 - protein, 20 aa, Artificial Sequence
  Synthetically generated peptide
  VARIANT (1)...(20): Xaa = Any Amino Acid
PGTCGXXXEICXAYAACTGC

SEQ ID NO: 2877 - protein, 20 aa, Artificial Sequence
  Synthetically generated peptide
  VARIANT (1)...(20): Xaa = Any Amino Acid
PGTCGXXXEICAXYAACTGC

SEQ ID NO: 2878 - protein, 20 aa, Artificial Sequence
  Synthetically generated peptide
  VARIANT (1)...(20): Xaa = Any Amino Acid
PGTCGXXXEICAYXAACTGC

SEQ ID NO: 2879 - protein, 20 aa, Artificial Sequence
  Synthetically generated peptide
  VARIANT (1)...(20): Xaa = Any Amino Acid
PGTCGXXXEICAYAXACTGC

SEQ ID NO: 2880 - protein, 20 aa, Artificial Sequence
  Synthetically generated peptide
  VARIANT (1)...(20): Xaa = Any Amino Acid
PGTCGXXXEICAYAAXCTGC

SEQ ID NO: 2881 - protein, 20 aa, Artificial Sequence
  Synthetically generated peptide
  VARIANT (1)...(20): Xaa = Any Amino Acid
PGTCGXXXEICAYAACXTGC

SEQ ID NO: 2882 - protein, 20 aa, Artificial Sequence
  Synthetically generated peptide
  VARIANT (1)...(20): Xaa = Any Amino Acid
PGTCGXXXEICAYAACTXGC

SEQ ID NO: 2883 - protein, 20 aa, Artificial Sequence
  Synthetically generated peptide
  VARIANT (1)...(20): Xaa = Any Amino Acid
PGTCGXXXEICAYAACTGXC

SEQ ID NO: 2884 - protein, 20 aa, Artificial Sequence
  Synthetically generated peptide
  VARIANT (1)...(20): Xaa = Any Amino Acid
PGTCGXXXEICAYAACTGCX

SEQ ID NO: 2885 - protein, 19 aa, Artificial Sequence
  Synthetically generated peptide
  VARIANT (1)...(19): Xaa = Any Amino Acid
PGTCGXXEXICAYAACTGC

SEQ ID NO: 2886 - protein, 20 aa, Artificial Sequence
  Synthetically generated peptide
  VARIANT (1)...(20): Xaa = Any Amino Acid
PGTCGXXEXXICAYAACTGC

SEQ ID NO: 2887 - protein, 20 aa, Artificial Sequence
  Synthetically generated peptide
  VARIANT (1)...(20): Xaa = Any Amino Acid
PGTCGXXEXIXCAYAACTGC

SEQ ID NO: 2888 - protein, 20 aa, Artificial Sequence
  Synthetically generated peptide
  VARIANT (1)...(20): Xaa = Any Amino Acid
PGTCGXXEXICXAYAACTGC

SEQ ID NO: 2889 - protein, 20 aa, Artificial Sequence
  Synthetically generated peptide
  VARIANT (1)...(20): Xaa = Any Amino Acid
PGTCGXXEXICAXYAACTGC

SEQ ID NO: 2890 - protein, 20 aa, Artificial Sequence
  Synthetically generated peptide
  VARIANT (1)...(20): Xaa = Any Amino Acid
PGTCGXXEXICAYXAACTGC

SEQ ID NO: 2891 - protein, 20 aa, Artificial Sequence
  Synthetically generated peptide
  VARIANT (1)...(20): Xaa = Any Amino Acid
PGTCGXXEXICAYAXACTGC

SEQ ID NO: 2892 - protein, 20 aa, Artificial Sequence
  Synthetically generated peptide
  VARIANT (1)...(20): Xaa = Any Amino Acid
PGTCGXXEXICAYAAXCTGC

SEQ ID NO: 2893 - protein, 20 aa, Artificial Sequence
  Synthetically generated peptide
  VARIANT (1)...(20): Xaa = Any Amino Acid
PGTCGXXEXICAYAACXTGC

SEQ ID NO: 2894 - protein, 20 aa, Artificial Sequence
  Synthetically generated peptide
  VARIANT (1)...(20): Xaa = Any Amino Acid
PGTCGXXEXICAYAACTXGC

SEQ ID NO: 2895 - protein, 20 aa, Artificial Sequence
  Synthetically generated peptide
  VARIANT (1)...(20): Xaa = Any Amino Acid
PGTCGXXEXICAYAACTGXC

SEQ ID NO: 2896 - protein, 20 aa, Artificial Sequence
  Synthetically generated peptide
  VARIANT (1)...(20): Xaa = Any Amino Acid
PGTCGXXEXICAYAACTGCX

SEQ ID NO: 2897 - protein, 19 aa, Artificial Sequence
  Synthetically generated peptide
  VARIANT (1)...(19): Xaa = Any Amino Acid
PGTCGXXEIXCAYAACTGC

SEQ ID NO: 2898 - protein, 20 aa, Artificial Sequence
  Synthetically generated peptide
  VARIANT (1)...(20): Xaa = Any Amino Acid
PGTCGXXEIXXCAYAACTGC

SEQ ID NO: 2899 - protein, 20 aa, Artificial Sequence
  Synthetically generated peptide
  VARIANT (1)...(20): Xaa = Any Amino Acid
PGTCGXXEIXCXAYAACTGC

SEQ ID NO: 2900 - protein, 20 aa, Artificial Sequence
  Synthetically generated peptide
  VARIANT (1)...(20): Xaa = Any Amino Acid
PGTCGXXEIXCAXYAACTGC

SEQ ID NO: 2901 - protein, 20 aa, Artificial Sequence
  Synthetically generated peptide
  VARIANT (1)...(20): Xaa = Any Amino Acid
PGTCGXXEIXCAYXAACTGC

SEQ ID NO: 2902 - protein, 20 aa, Artificial Sequence
  Synthetically generated peptide
  VARIANT (1)...(20): Xaa = Any Amino Acid
PGTCGXXEIXCAYAXACTGC

SEQ ID NO: 2903 - protein, 20 aa, Artificial Sequence
  Synthetically generated peptide
  VARIANT (1)...(20): Xaa = Any Amino Acid
PGTCGXXEIXCAYAAXCTGC

SEQ ID NO: 2904 - protein, 20 aa, Artificial Sequence
  Synthetically generated peptide
  VARIANT (1)...(20): Xaa = Any Amino Acid
PGTCGXXEIXCAYAACXTGC

SEQ ID NO: 2905 - protein, 20 aa, Artificial Sequence
  Synthetically generated peptide
  VARIANT (1)...(20): Xaa = Any Amino Acid
PGTCGXXEIXCAYAACTXGC

SEQ ID NO: 2906 - protein, 20 aa, Artificial Sequence
  Synthetically generated peptide
  VARIANT (1)...(20): Xaa = Any Amino Acid
PGTCGXXEIXCAYAACTGXC

SEQ ID NO: 2907 - protein, 20 aa, Artificial Sequence
  Synthetically generated peptide
  VARIANT (1)...(20): Xaa = Any Amino Acid
PGTCGXXEIXCAYAACTGCX

SEQ ID NO: 2908 - protein, 19 aa, Artificial Sequence
  Synthetically generated peptide
  VARIANT (1)...(19): Xaa = Any Amino Acid
PGTCGXXEICXAYAACTGC

SEQ ID NO: 2909 - protein, 20 aa, Artificial Sequence
  Synthetically generated peptide
  VARIANT (1)...(20): Xaa = Any Amino Acid
PGTCGXXEICXXAYAACTGC

SEQ ID NO: 2910 - protein, 20 aa, Artificial Sequence
  Synthetically generated peptide
  VARIANT (1)...(20): Xaa = Any Amino Acid
PGTCGXXEICXAXYAACTGC

SEQ ID NO: 2911 - protein, 20 aa, Artificial Sequence
  Synthetically generated peptide
  VARIANT (1)...(20): Xaa = Any Amino Acid
PGTCGXXEICXAYXAACTGC

SEQ ID NO: 2912 - protein, 20 aa, Artificial Sequence
  Synthetically generated peptide
  VARIANT (1)...(20): Xaa = Any Amino Acid
PGTCGXXEICXAYAXACTGC

SEQ ID NO: 2913 - protein, 20 aa, Artificial Sequence
  Synthetically generated peptide
  VARIANT (1)...(20): Xaa = Any Amino Acid
PGTCGXXEICXAYAAXCTGC

SEQ ID NO: 2914 - protein, 20 aa, Artificial Sequence
  Synthetically generated peptide
  VARIANT (1)...(20): Xaa = Any Amino Acid
PGTCGXXEICXAYAACXTGC

SEQ ID NO: 2915 - protein, 20 aa, Artificial Sequence
  Synthetically generated peptide
  VARIANT (1)...(20): Xaa = Any Amino Acid
PGTCGXXEICXAYAACTXGC

SEQ ID NO: 2916 - protein, 20 aa, Artificial Sequence
  Synthetically generated peptide
  VARIANT (1)...(20): Xaa = Any Amino Acid
PGTCGXXEICXAYAACTGXC

SEQ ID NO: 2917 - protein, 20 aa, Artificial Sequence
  Synthetically generated peptide
  VARIANT (1)...(20): Xaa = Any Amino Acid
PGTCGXXEICXAYAACTGCX

SEQ ID NO: 2918 - protein, 19 aa, Artificial Sequence
  Synthetically generated peptide
  VARIANT (1)...(19): Xaa = Any Amino Acid
PGTCGXXEICAXYAACTGC

SEQ ID NO: 2919 - protein, 20 aa, Artificial Sequence
  Synthetically generated peptide
  VARIANT (1)...(20): Xaa = Any Amino Acid
PGTCGXXEICAXXYAACTGC

SEQ ID NO: 2920 - protein, 20 aa, Artificial Sequence
  Synthetically generated peptide
  VARIANT (1)...(20): Xaa = Any Amino Acid
PGTCGXXEICAXYXAACTGC

SEQ ID NO: 2921 - protein, 20 aa, Artificial Sequence
  Synthetically generated peptide
  VARIANT (1)...(20): Xaa = Any Amino Acid
PGTCGXXEICAXYAXACTGC

SEQ ID NO: 2922 - protein, 20 aa, Artificial Sequence
  Synthetically generated peptide
  VARIANT (1)...(20): Xaa = Any Amino Acid
PGTCGXXEICAXYAAXCTGC

SEQ ID NO: 2923 - protein, 20 aa, Artificial Sequence
  Synthetically generated peptide
  VARIANT (1)...(20): Xaa = Any Amino Acid
PGTCGXXEICAXYAACXTGC

SEQ ID NO: 2924 - protein, 20 aa, Artificial Sequence
  Synthetically generated peptide
  VARIANT (1)...(20): Xaa = Any Amino Acid
PGTCGXXEICAXYAACTXGC

SEQ ID NO: 2925 - protein, 20 aa, Artificial Sequence
  Synthetically generated peptide
  VARIANT (1)...(20): Xaa = Any Amino Acid
PGTCGXXEICAXYAACTGXC

SEQ ID NO: 2926 - protein, 20 aa, Artificial Sequence
  Synthetically generated peptide
  VARIANT (1)...(20): Xaa = Any Amino Acid
PGTCGXXEICAXYAACTGCX

SEQ ID NO: 2927 - protein, 19 aa, Artificial Sequence
  Synthetically generated peptide
  VARIANT (1)...(19): Xaa = Any Amino Acid
PGTCGXXEICAYXAACTGC

SEQ ID NO: 2928 - protein, 20 aa, Artificial Sequence
  Synthetically generated peptide
  VARIANT (1)...(20): Xaa = Any Amino Acid
PGTCGXXEICAYXXAACTGC

SEQ ID NO: 2929 - protein, 20 aa, Artificial Sequence
  Synthetically generated peptide
  VARIANT (1)...(20): Xaa = Any Amino Acid
PGTCGXXEICAYXAXACTGC

SEQ ID NO: 2930 - protein, 20 aa, Artificial Sequence
  Synthetically generated peptide
  VARIANT (1)...(20): Xaa = Any Amino Acid
PGTCGXXEICAYXAAXCTGC

SEQ ID NO: 2931 - protein, 20 aa, Artificial Sequence
  Synthetically generated peptide
  VARIANT (1)...(20): Xaa = Any Amino Acid
PGTCGXXEICAYXAACXTGC

SEQ ID NO: 2932 - protein, 20 aa, Artificial Sequence
  Synthetically generated peptide
  VARIANT (1)...(20): Xaa = Any Amino Acid
PGTCGXXEICAYXAACTXGC

SEQ ID NO: 2933 - protein, 20 aa, Artificial Sequence
  Synthetically generated peptide
  VARIANT (1)...(20): Xaa = Any Amino Acid
PGTCGXXEICAYXAACTGXC

SEQ ID NO: 2934 - protein, 20 aa, Artificial Sequence
  Synthetically generated peptide
  VARIANT (1)...(20): Xaa = Any Amino Acid
PGTCGXXEICAYXAACTGCX

SEQ ID NO: 2935 - protein, 19 aa, Artificial Sequence
  Synthetically generated peptide
  VARIANT (1)...(19): Xaa = Any Amino Acid
PGTCGXXEICAYAXACTGC

SEQ ID NO: 2936 - protein, 20 aa, Artificial Sequence
  Synthetically generated peptide
  VARIANT (1)...(20): Xaa = Any Amino Acid
PGTCGXXEICAYAXXACTGC

SEQ ID NO: 2937 - protein, 20 aa, Artificial Sequence
  Synthetically generated peptide
  VARIANT (1)...(20): Xaa = Any Amino Acid
PGTCGXXEICAYAXAXCTGC

SEQ ID NO: 2938 - protein, 20 aa, Artificial Sequence
  Synthetically generated peptide
  VARIANT (1)...(20): Xaa = Any Amino Acid
PGTCGXXEICAYAXACXTGC

SEQ ID NO: 2939 - protein, 20 aa, Artificial Sequence
  Synthetically generated peptide
  VARIANT (1)...(20): Xaa = Any Amino Acid
PGTCGXXEICAYAXACTXGC

SEQ ID NO: 2940 - protein, 20 aa, Artificial Sequence
  Synthetically generated peptide
  VARIANT (1)...(20): Xaa = Any Amino Acid
PGTCGXXEICAYAXACTGXC

SEQ ID NO: 2941 - protein, 20 aa, Artificial Sequence
  Synthetically generated peptide
  VARIANT (1)...(20): Xaa = Any Amino Acid
PGTCGXXEICAYAXACTGCX

SEQ ID NO: 2942 - protein, 19 aa, Artificial Sequence
  Synthetically generated peptide
  VARIANT (1)...(19): Xaa = Any Amino Acid
PGTCGXXEICAYAAXCTGC

SEQ ID NO: 2943 - protein, 20 aa, Artificial Sequence
  Synthetically generated peptide
  VARIANT (1)...(20): Xaa = Any Amino Acid
PGTCGXXEICAYAAXXCTGC

SEQ ID NO: 2944 - protein, 20 aa, Artificial Sequence
  Synthetically generated peptide
  VARIANT (1)...(20): Xaa = Any Amino Acid
PGTCGXXEICAYAAXCXTGC

SEQ ID NO: 2945 - protein, 20 aa, Artificial Sequence
  Synthetically generated peptide
  VARIANT (1)...(20): Xaa = Any Amino Acid
PGTCGXXEICAYAAXCTXGC

SEQ ID NO: 2946 - protein, 20 aa, Artificial Sequence
  Synthetically generated peptide
  VARIANT (1)...(20): Xaa = Any Amino Acid
PGTCGXXEICAYAAXCTGXC

SEQ ID NO: 2947 - protein, 20 aa, Artificial Sequence
  Synthetically generated peptide
  VARIANT (1)...(20): Xaa = Any Amino Acid
PGTCGXXEICAYAAXCTGCX

SEQ ID NO: 2948 - protein, 19 aa, Artificial Sequence
  Synthetically generated peptide
  VARIANT (1)...(19): Xaa = Any Amino Acid
PGTCGXXEICAYAACXTGC

SEQ ID NO: 2949 - protein, 20 aa, Artificial Sequence
  Synthetically generated peptide
  VARIANT (1)...(20): Xaa = Any Amino Acid
PGTCGXXEICAYAACXXTGC

SEQ ID NO: 2950 - protein, 20 aa, Artificial Sequence
  Synthetically generated peptide
  VARIANT (1)...(20): Xaa = Any Amino Acid
PGTCGXXEICAYAACXTXGC

SEQ ID NO: 2951 - protein, 20 aa, Artificial Sequence
  Synthetically generated peptide
  VARIANT (1)...(20): Xaa = Any Amino Acid
PGTCGXXEICAYAACXTGXC

SEQ ID NO: 2952 - protein, 20 aa, Artificial Sequence
  Synthetically generated peptide
  VARIANT (1)...(20): Xaa = Any Amino Acid
PGTCGXXEICAYAACXTGCX

SEQ ID NO: 2953 - protein, 19 aa, Artificial Sequence
  Synthetically generated peptide
  VARIANT (1)...(19): Xaa = Any Amino Acid
PGTCGXXEICAYAACTXGC

SEQ ID NO: 2954 - protein, 20 aa, Artificial Sequence
  Synthetically generated peptide
  VARIANT (1)...(20): Xaa = Any Amino Acid
PGTCGXXEICAYAACTXXGC

SEQ ID NO: 2955 - protein, 20 aa, Artificial Sequence
  Synthetically generated peptide
  VARIANT (1)...(20): Xaa = Any Amino Acid
PGTCGXXEICAYAACTXGXC

SEQ ID NO: 2956 - protein, 20 aa, Artificial Sequence
  Synthetically generated peptide
  VARIANT (1)...(20): Xaa = Any Amino Acid
PGTCGXXEICAYAACTXGCX

SEQ ID NO: 2957 - protein, 19 aa, Artificial Sequence
  Synthetically generated peptide
  VARIANT (1)...(19): Xaa = Any Amino Acid
PGTCGXXEICAYAACTGXC

SEQ ID NO: 2958 - protein, 20 aa, Artificial Sequence
  Synthetically generated peptide
  VARIANT (1)...(20): Xaa = Any Amino Acid
PGTCGXXEICAYAACTGXXC

SEQ ID NO: 2959 - protein, 20 aa, Artificial Sequence
  Synthetically generated peptide
  VARIANT (1)...(20): Xaa = Any Amino Acid
PGTCGXXEICAYAACTGXCX

SEQ ID NO: 2960 - protein, 19 aa, Artificial Sequence
  Synthetically generated peptide
  VARIANT (1)...(19): Xaa = Any Amino Acid
PGTCGXXEICAYAACTGCX

SEQ ID NO: 2961 - protein, 20 aa, Artificial Sequence
  Synthetically generated peptide
  VARIANT (1)...(20): Xaa = Any Amino Acid
PGTCGXXEICAYAACTGCXX

SEQ ID NO: 2962 - protein, 18 aa, Artificial Sequence
  Synthetically generated peptide
  VARIANT (1)...(18): Xaa = Any Amino Acid
PGTCGXEXICAYAACTGC

SEQ ID NO: 2963 - protein, 19 aa, Artificial Sequence
  Synthetically generated peptide
  VARIANT (1)...(19): Xaa = Any Amino Acid
PGTCGXEXXICAYAACTGC

SEQ ID NO: 2964 - protein, 20 aa, Artificial Sequence
  Synthetically generated peptide
  VARIANT (1)...(20): Xaa = Any Amino Acid
PGTCGXEXXXICAYAACTGC

SEQ ID NO: 2965 - protein, 20 aa, Artificial Sequence
  Synthetically generated peptide
  VARIANT (1)...(20): Xaa = Any Amino Acid
PGTCGXEXXIXCAYAACTGC

SEQ ID NO: 2966 - protein, 20 aa, Artificial Sequence
  Synthetically generated peptide
  VARIANT (1)...(20): Xaa = Any Amino Acid
PGTCGXEXXICXAYAACTGC

SEQ ID NO: 2967 - protein, 20 aa, Artificial Sequence
  Synthetically generated peptide
  VARIANT (1)...(20): Xaa = Any Amino Acid
PGTCGXEXXICAXYAACTGC

SEQ ID NO: 2968 - protein, 20 aa, Artificial Sequence
  Synthetically generated peptide
  VARIANT (1)...(20): Xaa = Any Amino Acid
PGTCGXEXXICAYXAACTGC

SEQ ID NO: 2969 - protein, 20 aa, Artificial Sequence
  Synthetically generated peptide
  VARIANT (1)...(20): Xaa = Any Amino Acid
PGTCGXEXXICAYAXACTGC

SEQ ID NO: 2970 - protein, 20 aa, Artificial Sequence
  Synthetically generated peptide
  VARIANT (1)...(20): Xaa = Any Amino Acid
PGTCGXEXXICAYAAXCTGC

SEQ ID NO: 2971 - protein, 20 aa, Artificial Sequence
  Synthetically generated peptide
  VARIANT (1)...(20): Xaa = Any Amino Acid
PGTCGXEXXICAYAACXTGC

SEQ ID NO: 2972 - protein, 20 aa, Artificial Sequence
  Synthetically generated peptide
  VARIANT (1)...(20): Xaa = Any Amino Acid
PGTCGXEXXICAYAACTXGC

SEQ ID NO: 2973 - protein, 20 aa, Artificial Sequence
  Synthetically generated peptide
  VARIANT (1)...(20): Xaa = Any Amino Acid
PGTCGXEXXICAYAACTGXC

SEQ ID NO: 2974 - protein, 20 aa, Artificial Sequence
  Synthetically generated peptide
  VARIANT (1)...(20): Xaa = Any Amino Acid
PGTCGXEXXICAYAACTGCX

SEQ ID NO: 2975 - protein, 19 aa, Artificial Sequence
  Synthetically generated peptide
  VARIANT (1)...(19): Xaa = Any Amino Acid
PGTCGXEXIXCAYAACTGC

SEQ ID NO: 2976 - protein, 20 aa, Artificial Sequence
  Synthetically generated peptide
  VARIANT (1)...(20): Xaa = Any Amino Acid
PGTCGXEXIXXCAYAACTGC

SEQ ID NO: 2977 - protein, 20 aa, Artificial Sequence
  Synthetically generated peptide
  VARIANT (1)...(20): Xaa = Any Amino Acid
PGTCGXEXIXCXAYAACTGC

SEQ ID NO: 2978 - protein, 20 aa, Artificial Sequence
  Synthetically generated peptide
  VARIANT (1)...(20): Xaa = Any Amino Acid
PGTCGXEXIXCAXYAACTGC

SEQ ID NO: 2979 - protein, 20 aa, Artificial Sequence
  Synthetically generated peptide
  VARIANT (1)...(20): Xaa = Any Amino Acid
PGTCGXEXIXCAYXAACTGC

SEQ ID NO: 2980 - protein, 20 aa, Artificial Sequence
  Synthetically generated peptide
  VARIANT (1)...(20): Xaa = Any Amino Acid
PGTCGXEXIXCAYAXACTGC

SEQ ID NO: 2981 - protein, 20 aa, Artificial Sequence
  Synthetically generated peptide
  VARIANT (1)...(20): Xaa = Any Amino Acid
PGTCGXEXIXCAYAAXCTGC

SEQ ID NO: 2982 - protein, 20 aa, Artificial Sequence
  Synthetically generated peptide
  VARIANT (1)...(20): Xaa = Any Amino Acid
PGTCGXEXIXCAYAACXTGC

SEQ ID NO: 2983 - protein, 20 aa, Artificial Sequence
  Synthetically generated peptide
  VARIANT (1)...(20): Xaa = Any Amino Acid
PGTCGXEXIXCAYAACTXGC

SEQ ID NO: 2984 - protein, 20 aa, Artificial Sequence
  Synthetically generated peptide
  VARIANT (1)...(20): Xaa = Any Amino Acid
PGTCGXEXIXCAYAACTGXC

SEQ ID NO: 2985 - protein, 20 aa, Artificial Sequence
  Synthetically generated peptide
  VARIANT (1)...(20): Xaa = Any Amino Acid
PGTCGXEXIXCAYAACTGCX

SEQ ID NO: 2986 - protein, 19 aa, Artificial Sequence
  Synthetically generated peptide
  VARIANT (1)...(19): Xaa = Any Amino Acid
PGTCGXEXICXAYAACTGC

SEQ ID NO: 2987 - protein, 20 aa, Artificial Sequence
  Synthetically generated peptide
  VARIANT (1)...(20): Xaa = Any Amino Acid
PGTCGXEXICXXAYAACTGC

SEQ ID NO: 2988 - protein, 20 aa, Artificial Sequence
  Synthetically generated peptide
  VARIANT (1)...(20): Xaa = Any Amino Acid
PGTCGXEXICXAXYAACTGC

SEQ ID NO: 2989 - protein, 20 aa, Artificial Sequence
  Synthetically generated peptide
  VARIANT (1)...(20): Xaa = Any Amino Acid
PGTCGXEXICXAYXAACTGC

SEQ ID NO: 2990 - protein, 20 aa, Artificial Sequence
  Synthetically generated peptide
  VARIANT (1)...(20): Xaa = Any Amino Acid
PGTCGXEXICXAYAXACTGC

SEQ ID NO: 2991 - protein, 20 aa, Artificial Sequence
  Synthetically generated peptide
  VARIANT (1)...(20): Xaa = Any Amino Acid
PGTCGXEXICXAYAAXCTGC

SEQ ID NO: 2992 - protein, 20 aa, Artificial Sequence
  Synthetically generated peptide
  VARIANT (1)...(20): Xaa = Any Amino Acid
PGTCGXEXICXAYAACXTGC

SEQ ID NO: 2993 - protein, 20 aa, Artificial Sequence
  Synthetically generated peptide
  VARIANT (1)...(20): Xaa = Any Amino Acid
PGTCGXEXICXAYAACTXGC

SEQ ID NO: 2994 - protein, 20 aa, Artificial Sequence
  Synthetically generated peptide
  VARIANT (1)...(20): Xaa = Any Amino Acid
PGTCGXEXICXAYAACTGXC

SEQ ID NO: 2995 - protein, 20 aa, Artificial Sequence
  Synthetically generated peptide
  VARIANT (1)...(20): Xaa = Any Amino Acid
PGTCGXEXICXAYAACTGCX

SEQ ID NO: 2996 - protein, 19 aa, Artificial Sequence
  Synthetically generated peptide
  VARIANT (1)...(19): Xaa = Any Amino Acid
PGTCGXEXICAXYAACTGC

SEQ ID NO: 2997 - protein, 20 aa, Artificial Sequence
  Synthetically generated peptide
  VARIANT (1)...(20): Xaa = Any Amino Acid
PGTCGXEXICAXXYAACTGC

SEQ ID NO: 2998 - protein, 20 aa, Artificial Sequence
  Synthetically generated peptide
  VARIANT (1)...(20): Xaa = Any Amino Acid
PGTCGXEXICAXYXAACTGC

SEQ ID NO: 2999 - protein, 20 aa, Artificial Sequence
  Synthetically generated peptide
  VARIANT (1)...(20): Xaa = Any Amino Acid
PGTCGXEXICAXYAXACTGC

SEQ ID NO: 3000 - protein, 20 aa, Artificial Sequence
  Synthetically generated peptide
  VARIANT (1)...(20): Xaa = Any Amino Acid
PGTCGXEXICAXYAAXCTGC

SEQ ID NO: 3001 - protein, 20 aa, Artificial Sequence
  Synthetically generated peptide
  VARIANT (1)...(20): Xaa = Any Amino Acid
PGTCGXEXICAXYAACXTGC

SEQ ID NO: 3002 - protein, 20 aa, Artificial Sequence
  Synthetically generated peptide
  VARIANT (1)...(20): Xaa = Any Amino Acid
PGTCGXEXICAXYAACTXGC

SEQ ID NO: 3003 - protein, 20 aa, Artificial Sequence
  Synthetically generated peptide
  VARIANT (1)...(20): Xaa = Any Amino Acid
PGTCGXEXICAXYAACTGXC

SEQ ID NO: 3004 - protein, 20 aa, Artificial Sequence
  Synthetically generated peptide
  VARIANT (1)...(20): Xaa = Any Amino Acid
PGTCGXEXICAXYAACTGCX

SEQ ID NO: 3005 - protein, 19 aa, Artificial Sequence
  Synthetically generated peptide
  VARIANT (1)...(19): Xaa = Any Amino Acid
PGTCGXEXICAYXAACTGC

SEQ ID NO: 3006 - protein, 20 aa, Artificial Sequence
  Synthetically generated peptide
  VARIANT (1)...(20): Xaa = Any Amino Acid
PGTCGXEXICAYXXAACTGC

SEQ ID NO: 3007 - protein, 20 aa, Artificial Sequence
  Synthetically generated peptide
  VARIANT (1)...(20): Xaa = Any Amino Acid
PGTCGXEXICAYXAXACTGC

SEQ ID NO: 3008 - protein, 20 aa, Artificial Sequence
  Synthetically generated peptide
  VARIANT (1)...(20): Xaa = Any Amino Acid
PGTCGXEXICAYXAAXCTGC

SEQ ID NO: 3009 - protein, 20 aa, Artificial Sequence
  Synthetically generated peptide
  VARIANT (1)...(20): Xaa = Any Amino Acid
PGTCGXEXICAYXAACXTGC

SEQ ID NO: 3010 - protein, 20 aa, Artificial Sequence
  Synthetically generated peptide
  VARIANT (1)...(20): Xaa = Any Amino Acid
PGTCGXEXICAYXAACTXGC

SEQ ID NO: 3011 - protein, 20 aa, Artificial Sequence
  Synthetically generated peptide
  VARIANT (1)...(20): Xaa = Any Amino Acid
PGTCGXEXICAYXAACTGXC

SEQ ID NO: 3012 - protein, 20 aa, Artificial Sequence
  Synthetically generated peptide
  VARIANT (1)...(20): Xaa = Any Amino Acid
PGTCGXEXICAYXAACTGCX

SEQ ID NO: 3013 - protein, 19 aa, Artificial Sequence
  Synthetically generated peptide
  VARIANT (1)...(19): Xaa = Any Amino Acid
PGTCGXEXICAYAXACTGC

SEQ ID NO: 3014 - protein, 20 aa, Artificial Sequence
  Synthetically generated peptide
  VARIANT (1)...(20): Xaa = Any Amino Acid
PGTCGXEXICAYAXXACTGC

SEQ ID NO: 3015 - protein, 20 aa, Artificial Sequence
  Synthetically generated peptide
  VARIANT (1)...(20): Xaa = Any Amino Acid
PGTCGXEXICAYAXAXCTGC

SEQ ID NO: 3016 - protein, 20 aa, Artificial Sequence
  Synthetically generated peptide
  VARIANT (1)...(20): Xaa = Any Amino Acid
PGTCGXEXICAYAXACXTGC

SEQ ID NO: 3017 - protein, 20 aa, Artificial Sequence
  Synthetically generated peptide
  VARIANT (1)...(20): Xaa = Any Amino Acid
PGTCGXEXICAYAXACTXGC

SEQ ID NO: 3018 - protein, 20 aa, Artificial Sequence
  Synthetically generated peptide
  VARIANT (1)...(20): Xaa = Any Amino Acid
PGTCGXEXICAYAXACTGXC

SEQ ID NO: 3019 - protein, 20 aa, Artificial Sequence
  Synthetically generated peptide
  VARIANT (1)...(20): Xaa = Any Amino Acid
PGTCGXEXICAYAXACTGCX

SEQ ID NO: 3020 - protein, 19 aa, Artificial Sequence
  Synthetically generated peptide
  VARIANT (1)...(19): Xaa = Any Amino Acid
PGTCGXEXICAYAAXCTGC

SEQ ID NO: 3021 - protein, 20 aa, Artificial Sequence
  Synthetically generated peptide
  VARIANT (1)...(20): Xaa = Any Amino Acid
PGTCGXEXICAYAAXXCTGC

SEQ ID NO: 3022 - protein, 20 aa, Artificial Sequence
  Synthetically generated peptide
  VARIANT (1)...(20): Xaa = Any Amino Acid
PGTCGXEXICAYAAXCXTGC

SEQ ID NO: 3023 - protein, 20 aa, Artificial Sequence
  Synthetically generated peptide
  VARIANT (1)...(20): Xaa = Any Amino Acid
PGTCGXEXICAYAAXCTXGC

SEQ ID NO: 3024 - protein, 20 aa, Artificial Sequence
  Synthetically generated peptide
  VARIANT (1)...(20): Xaa = Any Amino Acid
PGTCGXEXICAYAAXCTGXC

SEQ ID NO: 3025 - protein, 20 aa, Artificial Sequence
  Synthetically generated peptide
  VARIANT (1)...(20): Xaa = Any Amino Acid
PGTCGXEXICAYAAXCTGCX

SEQ ID NO: 3026 - protein, 19 aa, Artificial Sequence
  Synthetically generated peptide
  VARIANT (1)...(19): Xaa = Any Amino Acid
PGTCGXEXICAYAACXTGC

SEQ ID NO: 3027 - protein, 20 aa, Artificial Sequence
  Synthetically generated peptide
  VARIANT (1)...(20): Xaa = Any Amino Acid
PGTCGXEXICAYAACXXTGC

SEQ ID NO: 3028 - protein, 20 aa, Artificial Sequence
  Synthetically generated peptide
  VARIANT (1)...(20): Xaa = Any Amino Acid
PGTCGXEXICAYAACXTXGC

SEQ ID NO: 3029 - protein, 20 aa, Artificial Sequence
  Synthetically generated peptide
  VARIANT (1)...(20): Xaa = Any Amino Acid
PGTCGXEXICAYAACXTGXC

SEQ ID NO: 3030 - protein, 20 aa, Artificial Sequence
  Synthetically generated peptide
  VARIANT (1)...(20): Xaa = Any Amino Acid
PGTCGXEXICAYAACXTGCX

SEQ ID NO: 3031 - protein, 19 aa, Artificial Sequence
  Synthetically generated peptide
  VARIANT (1)...(19): Xaa = Any Amino Acid
PGTCGXEXICAYAACTXGC

SEQ ID NO: 3032 - protein, 20 aa, Artificial Sequence
  Synthetically generated peptide
  VARIANT (1)...(20): Xaa = Any Amino Acid
PGTCGXEXICAYAACTXXGC

SEQ ID NO: 3033 - protein, 20 aa, Artificial Sequence
  Synthetically generated peptide
  VARIANT (1)...(20): Xaa = Any Amino Acid
PGTCGXEXICAYAACTXGXC

SEQ ID NO: 3034 - protein, 20 aa, Artificial Sequence
  Synthetically generated peptide
  VARIANT (1)...(20): Xaa = Any Amino Acid
PGTCGXEXICAYAACTXGCX

SEQ ID NO: 3035 - protein, 19 aa, Artificial Sequence
  Synthetically generated peptide
  VARIANT (1)...(19): Xaa = Any Amino Acid
PGTCGXEXICAYAACTGXC

SEQ ID NO: 3036 - protein, 20 aa, Artificial Sequence
  Synthetically generated peptide
  VARIANT (1)...(20): Xaa = Any Amino Acid
PGTCGXEXICAYAACTGXXC

SEQ ID NO: 3037 - protein, 20 aa, Artificial Sequence
  Synthetically generated peptide
  VARIANT (1)...(20): Xaa = Any Amino Acid
PGTCGXEXICAYAACTGXCX

SEQ ID NO: 3038 - protein, 19 aa, Artificial Sequence
  Synthetically generated peptide
  VARIANT (1)...(19): Xaa = Any Amino Acid
PGTCGXEXICAYAACTGCX

SEQ ID NO: 3039 - protein, 20 aa, Artificial Sequence
  Synthetically generated peptide
  VARIANT (1)...(20): Xaa = Any Amino Acid
PGTCGXEXICAYAACTGCXX

SEQ ID NO: 3040 - protein, 18 aa, Artificial Sequence
  Synthetically generated peptide
  VARIANT (1)...(18): Xaa = Any Amino Acid
PGTCGXEIXCAYAACTGC

SEQ ID NO: 3041 - protein, 19 aa, Artificial Sequence
  Synthetically generated peptide
  VARIANT (1)...(19): Xaa = Any Amino Acid
PGTCGXEIXXCAYAACTGC

SEQ ID NO: 3042 - protein, 20 aa, Artificial Sequence
  Synthetically generated peptide
  VARIANT (1)...(20): Xaa = Any Amino Acid
PGTCGXEIXXXCAYAACTGC

SEQ ID NO: 3043 - protein, 20 aa, Artificial Sequence
  Synthetically generated peptide
  VARIANT (1)...(20): Xaa = Any Amino Acid
PGTCGXEIXXCXAYAACTGC

SEQ ID NO: 3044 - protein, 20 aa, Artificial Sequence
  Synthetically generated peptide
  VARIANT (1)...(20): Xaa = Any Amino Acid
PGTCGXEIXXCAXYAACTGC

SEQ ID NO: 3045 - protein, 20 aa, Artificial Sequence
  Synthetically generated peptide
  VARIANT (1)...(20): Xaa = Any Amino Acid
PGTCGXEIXXCAYXAACTGC

SEQ ID NO: 3046 - protein, 20 aa, Artificial Sequence
  Synthetically generated peptide
  VARIANT (1)...(20): Xaa = Any Amino Acid
PGTCGXEIXXCAYAXACTGC

SEQ ID NO: 3047 - protein, 20 aa, Artificial Sequence
  Synthetically generated peptide
  VARIANT (1)...(20): Xaa = Any Amino Acid
PGTCGXEIXXCAYAAXCTGC

SEQ ID NO: 3048 - protein, 20 aa, Artificial Sequence
  Synthetically generated peptide
  VARIANT (1)...(20): Xaa = Any Amino Acid
PGTCGXEIXXCAYAACXTGC

SEQ ID NO: 3049 - protein, 20 aa, Artificial Sequence
  Synthetically generated peptide
  VARIANT (1)...(20): Xaa = Any Amino Acid
PGTCGXEIXXCAYAACTXGC

SEQ ID NO: 3050 - protein, 20 aa, Artificial Sequence
  Synthetically generated peptide
  VARIANT (1)...(20): Xaa = Any Amino Acid
PGTCGXEIXXCAYAACTGXC

SEQ ID NO: 3051 - protein, 20 aa, Artificial Sequence
  Synthetically generated peptide
  VARIANT (1)...(20): Xaa = Any Amino Acid
PGTCGXEIXXCAYAACTGCX

SEQ ID NO: 3052 - protein, 19 aa, Artificial Sequence
  Synthetically generated peptide
  VARIANT (1)...(19): Xaa = Any Amino Acid
PGTCGXEIXCXAYAACTGC

SEQ ID NO: 3053 - protein, 20 aa, Artificial Sequence
  Synthetically generated peptide
  VARIANT (1)...(20): Xaa = Any Amino Acid
PGTCGXEIXCXXAYAACTGC

SEQ ID NO: 3054 - protein, 20 aa, Artificial Sequence
  Synthetically generated peptide
  VARIANT (1)...(20): Xaa = Any Amino Acid
PGTCGXEIXCXAXYAACTGC

SEQ ID NO: 3055 - protein, 20 aa, Artificial Sequence
  Synthetically generated peptide
  VARIANT (1)...(20): Xaa = Any Amino Acid
PGTCGXEIXCXAYXAACTGC

SEQ ID NO: 3056 - protein, 20 aa, Artificial Sequence
  Synthetically generated peptide
  VARIANT (1)...(20): Xaa = Any Amino Acid
PGTCGXEIXCXAYAXACTGC

SEQ ID NO: 3057 - protein, 20 aa, Artificial Sequence
  Synthetically generated peptide
  VARIANT (1)...(20): Xaa = Any Amino Acid
PGTCGXEIXCXAYAAXCTGC

SEQ ID NO: 3058 - protein, 20 aa, Artificial Sequence
  Synthetically generated peptide
  VARIANT (1)...(20): Xaa = Any Amino Acid
PGTCGXEIXCXAYAACXTGC

SEQ ID NO: 3059 - protein, 20 aa, Artificial Sequence
  Synthetically generated peptide
  VARIANT (1)...(20): Xaa = Any Amino Acid
PGTCGXEIXCXAYAACTXGC

SEQ ID NO: 3060 - protein, 20 aa, Artificial Sequence
  Synthetically generated peptide
  VARIANT (1)...(20): Xaa = Any Amino Acid
PGTCGXEIXCXAYAACTGXC

SEQ ID NO: 3061 - protein, 20 aa, Artificial Sequence
  Synthetically generated peptide
  VARIANT (1)...(20): Xaa = Any Amino Acid
PGTCGXEIXCXAYAACTGCX

SEQ ID NO: 3062 - protein, 19 aa, Artificial Sequence
  Synthetically generated peptide
  VARIANT (1)...(19): Xaa = Any Amino Acid
PGTCGXEIXCAXYAACTGC

SEQ ID NO: 3063 - protein, 20 aa, Artificial Sequence
  Synthetically generated peptide
  VARIANT (1)...(20): Xaa = Any Amino Acid
PGTCGXEIXCAXXYAACTGC

SEQ ID NO: 3064 - protein, 20 aa, Artificial Sequence
  Synthetically generated peptide
  VARIANT (1)...(20): Xaa = Any Amino Acid
PGTCGXEIXCAXYXAACTGC

SEQ ID NO: 3065 - protein, 20 aa, Artificial Sequence
  Synthetically generated peptide
  VARIANT (1)...(20): Xaa = Any Amino Acid
PGTCGXEIXCAXYAXACTGC

SEQ ID NO: 3066 - protein, 20 aa, Artificial Sequence
  Synthetically generated peptide
  VARIANT (1)...(20): Xaa = Any Amino Acid
PGTCGXEIXCAXYAAXCTGC

SEQ ID NO: 3067 - protein, 20 aa, Artificial Sequence
  Synthetically generated peptide
  VARIANT (1)...(20): Xaa = Any Amino Acid
PGTCGXEIXCAXYAACXTGC

SEQ ID NO: 3068 - protein, 20 aa, Artificial Sequence
  Synthetically generated peptide
  VARIANT (1)...(20): Xaa = Any Amino Acid
PGTCGXEIXCAXYAACTXGC

SEQ ID NO: 3069 - protein, 20 aa, Artificial Sequence
  Synthetically generated peptide
  VARIANT (1)...(20): Xaa = Any Amino Acid
PGTCGXEIXCAXYAACTGXC

SEQ ID NO: 3070 - protein, 20 aa, Artificial Sequence
  Synthetically generated peptide
  VARIANT (1)...(20): Xaa = Any Amino Acid
PGTCGXEIXCAXYAACTGCX

SEQ ID NO: 3071 - protein, 19 aa, Artificial Sequence
  Synthetically generated peptide
  VARIANT (1)...(19): Xaa = Any Amino Acid
PGTCGXEIXCAYXAACTGC

SEQ ID NO: 3072 - protein, 20 aa, Artificial Sequence
  Synthetically generated peptide
  VARIANT (1)...(20): Xaa = Any Amino Acid
PGTCGXEIXCAYXXAACTGC

SEQ ID NO: 3073 - protein, 20 aa, Artificial Sequence
  Synthetically generated peptide
  VARIANT (1)...(20): Xaa = Any Amino Acid
PGTCGXEIXCAYXAXACTGC

SEQ ID NO: 3074 - protein, 20 aa, Artificial Sequence
  Synthetically generated peptide
  VARIANT (1)...(20): Xaa = Any Amino Acid
PGTCGXEIXCAYXAAXCTGC

SEQ ID NO: 3075 - protein, 20 aa, Artificial Sequence
  Synthetically generated peptide
  VARIANT (1)...(20): Xaa = Any Amino Acid
PGTCGXEIXCAYXAACXTGC

SEQ ID NO: 3076 - protein, 20 aa, Artificial Sequence
  Synthetically generated peptide
  VARIANT (1)...(20): Xaa = Any Amino Acid
PGTCGXEIXCAYXAACTXGC

SEQ ID NO: 3077 - protein, 20 aa, Artificial Sequence
  Synthetically generated peptide
  VARIANT (1)...(20): Xaa = Any Amino Acid
PGTCGXEIXCAYXAACTGXC

SEQ ID NO: 3078 - protein, 20 aa, Artificial Sequence
  Synthetically generated peptide
  VARIANT (1)...(20): Xaa = Any Amino Acid
PGTCGXEIXCAYXAACTGCX

SEQ ID NO: 3079 - protein, 19 aa, Artificial Sequence
  Synthetically generated peptide
  VARIANT (1)...(19): Xaa = Any Amino Acid
PGTCGXEIXCAYAXACTGC

SEQ ID NO: 3080 - protein, 20 aa, Artificial Sequence
  Synthetically generated peptide
  VARIANT (1)...(20): Xaa = Any Amino Acid
PGTCGXEIXCAYAXXACTGC

SEQ ID NO: 3081 - protein, 20 aa, Artificial Sequence
  Synthetically generated peptide
  VARIANT (1)...(20): Xaa = Any Amino Acid
PGTCGXEIXCAYAXAXCTGC

SEQ ID NO: 3082 - protein, 20 aa, Artificial Sequence
  Synthetically generated peptide
  VARIANT (1)...(20): Xaa = Any Amino Acid
PGTCGXEIXCAYAXACXTGC

SEQ ID NO: 3083 - protein, 20 aa, Artificial Sequence
  Synthetically generated peptide
  VARIANT (1)...(20): Xaa = Any Amino Acid
PGTCGXEIXCAYAXACTXGC

SEQ ID NO: 3084 - protein, 20 aa, Artificial Sequence
  Synthetically generated peptide
  VARIANT (1)...(20): Xaa = Any Amino Acid
PGTCGXEIXCAYAXACTGXC

SEQ ID NO: 3085 - protein, 20 aa, Artificial Sequence
  Synthetically generated peptide
  VARIANT (1)...(20): Xaa = Any Amino Acid
PGTCGXEIXCAYAXACTGCX

SEQ ID NO: 3086 - protein, 19 aa, Artificial Sequence
  Synthetically generated peptide
  VARIANT (1)...(19): Xaa = Any Amino Acid
PGTCGXEIXCAYAAXCTGC

SEQ ID NO: 3087 - protein, 20 aa, Artificial Sequence
  Synthetically generated peptide
  VARIANT (1)...(20): Xaa = Any Amino Acid
PGTCGXEIXCAYAAXXCTGC

SEQ ID NO: 3088 - protein, 20 aa, Artificial Sequence
  Synthetically generated peptide
  VARIANT (1)...(20): Xaa = Any Amino Acid
PGTCGXEIXCAYAAXCXTGC

SEQ ID NO: 3089 - protein, 20 aa, Artificial Sequence
  Synthetically generated peptide
  VARIANT (1)...(20): Xaa = Any Amino Acid
PGTCGXEIXCAYAAXCTXGC

SEQ ID NO: 3090 - protein, 20 aa, Artificial Sequence
  Synthetically generated peptide
  VARIANT (1)...(20): Xaa = Any Amino Acid
PGTCGXEIXCAYAAXCTGXC

SEQ ID NO: 3091 - protein, 20 aa, Artificial Sequence
  Synthetically generated peptide
  VARIANT (1)...(20): Xaa = Any Amino Acid
PGTCGXEIXCAYAAXCTGCX

SEQ ID NO: 3092 - protein, 19 aa, Artificial Sequence
  Synthetically generated peptide
  VARIANT (1)...(19): Xaa = Any Amino Acid
PGTCGXEIXCAYAACXTGC

SEQ ID NO: 3093 - protein, 20 aa, Artificial Sequence
  Synthetically generated peptide
  VARIANT (1)...(20): Xaa = Any Amino Acid
PGTCGXEIXCAYAACXXTGC

SEQ ID NO: 3094 - protein, 20 aa, Artificial Sequence
  Synthetically generated peptide
  VARIANT (1)...(20): Xaa = Any Amino Acid
PGTCGXEIXCAYAACXTXGC

SEQ ID NO: 3095 - protein, 20 aa, Artificial Sequence
  Synthetically generated peptide
  VARIANT (1)...(20): Xaa = Any Amino Acid
PGTCGXEIXCAYAACXTGXC

SEQ ID NO: 3096 - protein, 20 aa, Artificial Sequence
  Synthetically generated peptide
  VARIANT (1)...(20): Xaa = Any Amino Acid
PGTCGXEIXCAYAACXTGCX

SEQ ID NO: 3097 - protein, 19 aa, Artificial Sequence
  Synthetically generated peptide
  VARIANT (1)...(19): Xaa = Any Amino Acid
PGTCGXEIXCAYAACTXGC

SEQ ID NO: 3098 - protein, 20 aa, Artificial Sequence
  Synthetically generated peptide
  VARIANT (1)...(20): Xaa = Any Amino Acid
PGTCGXEIXCAYAACTXXGC

SEQ ID NO: 3099 - protein, 20 aa, Artificial Sequence
  Synthetically generated peptide
  VARIANT (1)...(20): Xaa = Any Amino Acid
PGTCGXEIXCAYAACTXGXC

SEQ ID NO: 3100 - protein, 20 aa, Artificial Sequence
  Synthetically generated peptide
  VARIANT (1)...(20): Xaa = Any Amino Acid
PGTCGXEIXCAYAACTXGCX

SEQ ID NO: 3101 - protein, 19 aa, Artificial Sequence
  Synthetically generated peptide
  VARIANT (1)...(19): Xaa = Any Amino Acid
PGTCGXEIXCAYAACTGXC

SEQ ID NO: 3102 - protein, 20 aa, Artificial Sequence
  Synthetically generated peptide
  VARIANT (1)...(20): Xaa = Any Amino Acid
PGTCGXEIXCAYAACTGXXC

SEQ ID NO: 3103 - protein, 20 aa, Artificial Sequence
  Synthetically generated peptide
  VARIANT (1)...(20): Xaa = Any Amino Acid
PGTCGXEIXCAYAACTGXCX

SEQ ID NO: 3104 - protein, 19 aa, Artificial Sequence
  Synthetically generated peptide
  VARIANT (1)...(19): Xaa = Any Amino Acid
PGTCGXEIXCAYAACTGCX

SEQ ID NO: 3105 - protein, 20 aa, Artificial Sequence
  Synthetically generated peptide
  VARIANT (1)...(20): Xaa = Any Amino Acid
PGTCGXEIXCAYAACTGCXX

SEQ ID NO: 3106 - protein, 18 aa, Artificial Sequence
  Synthetically generated peptide
  VARIANT (1)...(18): Xaa = Any Amino Acid
PGTCGXEICXAYAACTGC

SEQ ID NO: 3107 - protein, 19 aa, Artificial Sequence
  Synthetically generated peptide
  VARIANT (1)...(19): Xaa = Any Amino Acid
PGTCGXEICXXAYAACTGC

SEQ ID NO: 3108 - protein, 20 aa, Artificial Sequence
  Synthetically generated peptide
  VARIANT (1)...(20): Xaa = Any Amino Acid
PGTCGXEICXXXAYAACTGC

SEQ ID NO: 3109 - protein, 20 aa, Artificial Sequence
  Synthetically generated peptide
  VARIANT (1)...(20): Xaa = Any Amino Acid
PGTCGXEICXXAXYAACTGC

SEQ ID NO: 3110 - protein, 20 aa, Artificial Sequence
  Synthetically generated peptide
  VARIANT (1)...(20): Xaa = Any Amino Acid
PGTCGXEICXXAYXAACTGC

SEQ ID NO: 3111 - protein, 20 aa, Artificial Sequence
  Synthetically generated peptide
  VARIANT (1)...(20): Xaa = Any Amino Acid
PGTCGXEICXXAYAXACTGC

SEQ ID NO: 3112 - protein, 20 aa, Artificial Sequence
  Synthetically generated peptide
  VARIANT (1)...(20): Xaa = Any Amino Acid
PGTCGXEICXXAYAAXCTGC

SEQ ID NO: 3113 - protein, 20 aa, Artificial Sequence
  Synthetically generated peptide
  VARIANT (1)...(20): Xaa = Any Amino Acid
PGTCGXEICXXAYAACXTGC

SEQ ID NO: 3114 - protein, 20 aa, Artificial Sequence
  Synthetically generated peptide
  VARIANT (1)...(20): Xaa = Any Amino Acid
PGTCGXEICXXAYAACTXGC

SEQ ID NO: 3115 - protein, 20 aa, Artificial Sequence
  Synthetically generated peptide
  VARIANT (1)...(20): Xaa = Any Amino Acid
PGTCGXEICXXAYAACTGXC

SEQ ID NO: 3116 - protein, 20 aa, Artificial Sequence
  Synthetically generated peptide
  VARIANT (1)...(20): Xaa = Any Amino Acid
PGTCGXEICXXAYAACTGCX

SEQ ID NO: 3117 - protein, 19 aa, Artificial Sequence
  Synthetically generated peptide
  VARIANT (1)...(19): Xaa = Any Amino Acid
PGTCGXEICXAXYAACTGC

SEQ ID NO: 3118 - protein, 20 aa, Artificial Sequence
  Synthetically generated peptide
  VARIANT (1)...(20): Xaa = Any Amino Acid
PGTCGXEICXAXXYAACTGC

SEQ ID NO: 3119 - protein, 20 aa, Artificial Sequence
  Synthetically generated peptide
  VARIANT (1)...(20): Xaa = Any Amino Acid
PGTCGXEICXAXYXAACTGC

SEQ ID NO: 3120 - protein, 20 aa, Artificial Sequence
  Synthetically generated peptide
  VARIANT (1)...(20): Xaa = Any Amino Acid
PGTCGXEICXAXYAXACTGC

SEQ ID NO: 3121 - protein, 20 aa, Artificial Sequence
  Synthetically generated peptide
  VARIANT (1)...(20): Xaa = Any Amino Acid
PGTCGXEICXAXYAAXCTGC

SEQ ID NO: 3122 - protein, 20 aa, Artificial Sequence
  Synthetically generated peptide
  VARIANT (1)...(20): Xaa = Any Amino Acid
PGTCGXEICXAXYAACXTGC

SEQ ID NO: 3123 - protein, 20 aa, Artificial Sequence
  Synthetically generated peptide
  VARIANT (1)...(20): Xaa = Any Amino Acid
PGTCGXEICXAXYAACTXGC

SEQ ID NO: 3124 - protein, 20 aa, Artificial Sequence
  Synthetically generated peptide
  VARIANT (1)...(20): Xaa = Any Amino Acid
PGTCGXEICXAXYAACTGXC

SEQ ID NO: 3125 - protein, 20 aa, Artificial Sequence
  Synthetically generated peptide
  VARIANT (1)...(20): Xaa = Any Amino Acid
PGTCGXEICXAXYAACTGCX

SEQ ID NO: 3126 - protein, 19 aa, Artificial Sequence
  Synthetically generated peptide
  VARIANT (1)...(19): Xaa = Any Amino Acid
PGTCGXEICXAYXAACTGC

SEQ ID NO: 3127 - protein, 20 aa, Artificial Sequence
  Synthetically generated peptide
  VARIANT (1)...(20): Xaa = Any Amino Acid
PGTCGXEICXAYXXAACTGC

SEQ ID NO: 3128 - protein, 20 aa, Artificial Sequence
  Synthetically generated peptide
  VARIANT (1)...(20): Xaa = Any Amino Acid
PGTCGXEICXAYXAXACTGC

SEQ ID NO: 3129 - protein, 20 aa, Artificial Sequence
  Synthetically generated peptide
  VARIANT (1)...(20): Xaa = Any Amino Acid
PGTCGXEICXAYXAAXCTGC

SEQ ID NO: 3130 - protein, 20 aa, Artificial Sequence
  Synthetically generated peptide
  VARIANT (1)...(20): Xaa = Any Amino Acid
PGTCGXEICXAYXAACXTGC

SEQ ID NO: 3131 - protein, 20 aa, Artificial Sequence
  Synthetically generated peptide
  VARIANT (1)...(20): Xaa = Any Amino Acid
PGTCGXEICXAYXAACTXGC

SEQ ID NO: 3132 - protein, 20 aa, Artificial Sequence
  Synthetically generated peptide
  VARIANT (1)...(20): Xaa = Any Amino Acid
PGTCGXEICXAYXAACTGXC

SEQ ID NO: 3133 - protein, 20 aa, Artificial Sequence
  Synthetically generated peptide
  VARIANT (1)...(20): Xaa = Any Amino Acid
PGTCGXEICXAYXAACTGCX

SEQ ID NO: 3134 - protein, 19 aa, Artificial Sequence
  Synthetically generated peptide
  VARIANT (1)...(19): Xaa = Any Amino Acid
PGTCGXEICXAYAXACTGC

SEQ ID NO: 3135 - protein, 20 aa, Artificial Sequence
  Synthetically generated peptide
  VARIANT (1)...(20): Xaa = Any Amino Acid
PGTCGXEICXAYAXXACTGC

SEQ ID NO: 3136 - protein, 20 aa, Artificial Sequence
  Synthetically generated peptide
  VARIANT (1)...(20): Xaa = Any Amino Acid
PGTCGXEICXAYAXAXCTGC

SEQ ID NO: 3137 - protein, 20 aa, Artificial Sequence
  Synthetically generated peptide
  VARIANT (1)...(20): Xaa = Any Amino Acid
PGTCGXEICXAYAXACXTGC

SEQ ID NO: 3138 - protein, 20 aa, Artificial Sequence
  Synthetically generated peptide
  VARIANT (1)...(20): Xaa = Any Amino Acid
PGTCGXEICXAYAXACTXGC

SEQ ID NO: 3139 - protein, 20 aa, Artificial Sequence
  Synthetically generated peptide
  VARIANT (1)...(20): Xaa = Any Amino Acid
PGTCGXEICXAYAXACTGXC

SEQ ID NO: 3140 - protein, 20 aa, Artificial Sequence
  Synthetically generated peptide
  VARIANT (1)...(20): Xaa = Any Amino Acid
PGTCGXEICXAYAXACTGCX

SEQ ID NO: 3141 - protein, 19 aa, Artificial Sequence
  Synthetically generated peptide
  VARIANT (1)...(19): Xaa = Any Amino Acid
PGTCGXEICXAYAAXCTGC

SEQ ID NO: 3142 - protein, 20 aa, Artificial Sequence
  Synthetically generated peptide
  VARIANT (1)...(20): Xaa = Any Amino Acid
PGTCGXEICXAYAAXXCTGC

SEQ ID NO: 3143 - protein, 20 aa, Artificial Sequence
  Synthetically generated peptide
  VARIANT (1)...(20): Xaa = Any Amino Acid
PGTCGXEICXAYAAXCXTGC

SEQ ID NO: 3144 - protein, 20 aa, Artificial Sequence
  Synthetically generated peptide
  VARIANT (1)...(20): Xaa = Any Amino Acid
PGTCGXEICXAYAAXCTXGC

SEQ ID NO: 3145 - protein, 20 aa, Artificial Sequence
  Synthetically generated peptide
  VARIANT (1)...(20): Xaa = Any Amino Acid
PGTCGXEICXAYAAXCTGXC

SEQ ID NO: 3146 - protein, 20 aa, Artificial Sequence
  Synthetically generated peptide
  VARIANT (1)...(20): Xaa = Any Amino Acid
PGTCGXEICXAYAAXCTGCX

SEQ ID NO: 3147 - protein, 19 aa, Artificial Sequence
  Synthetically generated peptide
  VARIANT (1)...(19): Xaa = Any Amino Acid
PGTCGXEICXAYAACXTGC

SEQ ID NO: 3148 - protein, 20 aa, Artificial Sequence
  Synthetically generated peptide
  VARIANT (1)...(20): Xaa = Any Amino Acid
PGTCGXEICXAYAACXXTGC

SEQ ID NO: 3149 - protein, 20 aa, Artificial Sequence
  Synthetically generated peptide
  VARIANT (1)...(20): Xaa = Any Amino Acid
PGTCGXEICXAYAACXTXGC

SEQ ID NO: 3150 - protein, 20 aa, Artificial Sequence
  Synthetically generated peptide
  VARIANT (1)...(20): Xaa = Any Amino Acid
PGTCGXEICXAYAACXTGXC

SEQ ID NO: 3151 - protein, 20 aa, Artificial Sequence
  Synthetically generated peptide
  VARIANT (1)...(20): Xaa = Any Amino Acid
PGTCGXEICXAYAACXTGCX

SEQ ID NO: 3152 - protein, 19 aa, Artificial Sequence
  Synthetically generated peptide
  VARIANT (1)...(19): Xaa = Any Amino Acid
PGTCGXEICXAYAACTXGC

SEQ ID NO: 3153 - protein, 20 aa, Artificial Sequence
  Synthetically generated peptide
  VARIANT (1)...(20): Xaa = Any Amino Acid
PGTCGXEICXAYAACTXXGC

SEQ ID NO: 3154 - protein, 20 aa, Artificial Sequence
  Synthetically generated peptide
  VARIANT (1)...(20): Xaa = Any Amino Acid
PGTCGXEICXAYAACTXGXC

SEQ ID NO: 3155 - protein, 20 aa, Artificial Sequence
  Synthetically generated peptide
  VARIANT (1)...(20): Xaa = Any Amino Acid
PGTCGXEICXAYAACTXGCX

SEQ ID NO: 3156 - protein, 19 aa, Artificial Sequence
  Synthetically generated peptide
  VARIANT (1)...(19): Xaa = Any Amino Acid
PGTCGXEICXAYAACTGXC

SEQ ID NO: 3157 - protein, 20 aa, Artificial Sequence
  Synthetically generated peptide
  VARIANT (1)...(20): Xaa = Any Amino Acid
PGTCGXEICXAYAACTGXXC

SEQ ID NO: 3158 - protein, 20 aa, Artificial Sequence
  Synthetically generated peptide
  VARIANT (1)...(20): Xaa = Any Amino Acid
PGTCGXEICXAYAACTGXCX

SEQ ID NO: 3159 - protein, 19 aa, Artificial Sequence
  Synthetically generated peptide
  VARIANT (1)...(19): Xaa = Any Amino Acid
PGTCGXEICXAYAACTGCX

SEQ ID NO: 3160 - protein, 20 aa, Artificial Sequence
  Synthetically generated peptide
  VARIANT (1)...(20): Xaa = Any Amino Acid
PGTCGXEICXAYAACTGCXX

SEQ ID NO: 3161 - protein, 18 aa, Artificial Sequence
  Synthetically generated peptide
  VARIANT (1)...(18): Xaa = Any Amino Acid
PGTCGXEICAXYAACTGC

SEQ ID NO: 3162 - protein, 19 aa, Artificial Sequence
  Synthetically generated peptide
  VARIANT (1)...(19): Xaa = Any Amino Acid
PGTCGXEICAXXYAACTGC

SEQ ID NO: 3163 - protein, 20 aa, Artificial Sequence
  Synthetically generated peptide
  VARIANT (1)...(20): Xaa = Any Amino Acid
PGTCGXEICAXXXYAACTGC

SEQ ID NO: 3164 - protein, 20 aa, Artificial Sequence
  Synthetically generated peptide
  VARIANT (1)...(20): Xaa = Any Amino Acid
PGTCGXEICAXXYXAACTGC

SEQ ID NO: 3165 - protein, 20 aa, Artificial Sequence
  Synthetically generated peptide
  VARIANT (1)...(20): Xaa = Any Amino Acid
PGTCGXEICAXXYAXACTGC

SEQ ID NO: 3166 - protein, 20 aa, Artificial Sequence
  Synthetically generated peptide
  VARIANT (1)...(20): Xaa = Any Amino Acid
PGTCGXEICAXXYAAXCTGC

SEQ ID NO: 3167 - protein, 20 aa, Artificial Sequence
  Synthetically generated peptide
  VARIANT (1)...(20): Xaa = Any Amino Acid
PGTCGXEICAXXYAACXTGC

SEQ ID NO: 3168 - protein, 20 aa, Artificial Sequence
  Synthetically generated peptide
  VARIANT (1)...(20): Xaa = Any Amino Acid
PGTCGXEICAXXYAACTXGC

SEQ ID NO: 3169 - protein, 20 aa, Artificial Sequence
  Synthetically generated peptide
  VARIANT (1)...(20): Xaa = Any Amino Acid
PGTCGXEICAXXYAACTGXC

SEQ ID NO: 3170 - protein, 20 aa, Artificial Sequence
  Synthetically generated peptide
  VARIANT (1)...(20): Xaa = Any Amino Acid
PGTCGXEICAXXYAACTGCX

SEQ ID NO: 3171 - protein, 19 aa, Artificial Sequence
  Synthetically generated peptide
  VARIANT (1)...(19): Xaa = Any Amino Acid
PGTCGXEICAXYXAACTGC

SEQ ID NO: 3172 - protein, 20 aa, Artificial Sequence
  Synthetically generated peptide
  VARIANT (1)...(20): Xaa = Any Amino Acid
PGTCGXEICAXYXXAACTGC

SEQ ID NO: 3173 - protein, 20 aa, Artificial Sequence
  Synthetically generated peptide
  VARIANT (1)...(20): Xaa = Any Amino Acid
PGTCGXEICAXYXAXACTGC

SEQ ID NO: 3174 - protein, 20 aa, Artificial Sequence
  Synthetically generated peptide
  VARIANT (1)...(20): Xaa = Any Amino Acid
PGTCGXEICAXYXAAXCTGC

SEQ ID NO: 3175 - protein, 20 aa, Artificial Sequence
  Synthetically generated peptide
  VARIANT (1)...(20): Xaa = Any Amino Acid
PGTCGXEICAXYXAACXTGC

SEQ ID NO: 3176 - protein, 20 aa, Artificial Sequence
  Synthetically generated peptide
  VARIANT (1)...(20): Xaa = Any Amino Acid
PGTCGXEICAXYXAACTXGC

SEQ ID NO: 3177 - protein, 20 aa, Artificial Sequence
  Synthetically generated peptide
  VARIANT (1)...(20): Xaa = Any Amino Acid
PGTCGXEICAXYXAACTGXC

SEQ ID NO: 3178 - protein, 20 aa, Artificial Sequence
  Synthetically generated peptide
  VARIANT (1)...(20): Xaa = Any Amino Acid
PGTCGXEICAXYXAACTGCX

SEQ ID NO: 3179 - protein, 19 aa, Artificial Sequence
  Synthetically generated peptide
  VARIANT (1)...(19): Xaa = Any Amino Acid
PGTCGXEICAXYAXACTGC

SEQ ID NO: 3180 - protein, 20 aa, Artificial Sequence
  Synthetically generated peptide
  VARIANT (1)...(20): Xaa = Any Amino Acid
PGTCGXEICAXYAXXACTGC

SEQ ID NO: 3181 - protein, 20 aa, Artificial Sequence
  Synthetically generated peptide
  VARIANT (1)...(20): Xaa = Any Amino Acid
PGTCGXEICAXYAXAXCTGC

SEQ ID NO: 3182 - protein, 20 aa, Artificial Sequence
  Synthetically generated peptide
  VARIANT (1)...(20): Xaa = Any Amino Acid
PGTCGXEICAXYAXACXTGC

SEQ ID NO: 3183 - protein, 20 aa, Artificial Sequence
  Synthetically generated peptide
  VARIANT (1)...(20): Xaa = Any Amino Acid
PGTCGXEICAXYAXACTXGC

SEQ ID NO: 3184 - protein, 20 aa, Artificial Sequence
  Synthetically generated peptide
  VARIANT (1)...(20): Xaa = Any Amino Acid
PGTCGXEICAXYAXACTGXC

SEQ ID NO: 3185 - protein, 20 aa, Artificial Sequence
  Synthetically generated peptide
  VARIANT (1)...(20): Xaa = Any Amino Acid
PGTCGXEICAXYAXACTGCX

SEQ ID NO: 3186 - protein, 19 aa, Artificial Sequence
  Synthetically generated peptide
  VARIANT (1)...(19): Xaa = Any Amino Acid
PGTCGXEICAXYAAXCTGC

SEQ ID NO: 3187 - protein, 20 aa, Artificial Sequence
  Synthetically generated peptide
  VARIANT (1)...(20): Xaa = Any Amino Acid
PGTCGXEICAXYAAXXCTGC

SEQ ID NO: 3188 - protein, 20 aa, Artificial Sequence
  Synthetically generated peptide
  VARIANT (1)...(20): Xaa = Any Amino Acid
PGTCGXEICAXYAAXCXTGC

SEQ ID NO: 3189 - protein, 20 aa, Artificial Sequence
  Synthetically generated peptide
  VARIANT (1)...(20): Xaa = Any Amino Acid
PGTCGXEICAXYAAXCTXGC

SEQ ID NO: 3190 - protein, 20 aa, Artificial Sequence
  Synthetically generated peptide
  VARIANT (1)...(20): Xaa = Any Amino Acid
PGTCGXEICAXYAAXCTGXC

SEQ ID NO: 3191 - protein, 20 aa, Artificial Sequence
  Synthetically generated peptide
  VARIANT (1)...(20): Xaa = Any Amino Acid
PGTCGXEICAXYAAXCTGCX

SEQ ID NO: 3192 - protein, 19 aa, Artificial Sequence
  Synthetically generated peptide
  VARIANT (1)...(19): Xaa = Any Amino Acid
PGTCGXEICAXYAACXTGC

SEQ ID NO: 3193 - protein, 20 aa, Artificial Sequence
  Synthetically generated peptide
  VARIANT (1)...(20): Xaa = Any Amino Acid
PGTCGXEICAXYAACXXTGC

SEQ ID NO: 3194 - protein, 20 aa, Artificial Sequence
  Synthetically generated peptide
  VARIANT (1)...(20): Xaa = Any Amino Acid
PGTCGXEICAXYAACXTXGC

SEQ ID NO: 3195 - protein, 20 aa, Artificial Sequence
  Synthetically generated peptide
  VARIANT (1)...(20): Xaa = Any Amino Acid
PGTCGXEICAXYAACXTGXC

SEQ ID NO: 3196 - protein, 20 aa, Artificial Sequence
  Synthetically generated peptide
  VARIANT (1)...(20): Xaa = Any Amino Acid
PGTCGXEICAXYAACXTGCX

SEQ ID NO: 3197 - protein, 19 aa, Artificial Sequence
  Synthetically generated peptide
  VARIANT (1)...(19): Xaa = Any Amino Acid
PGTCGXEICAXYAACTXGC

SEQ ID NO: 3198 - protein, 20 aa, Artificial Sequence
  Synthetically generated peptide
  VARIANT (1)...(20): Xaa = Any Amino Acid
PGTCGXEICAXYAACTXXGC

SEQ ID NO: 3199 - protein, 20 aa, Artificial Sequence
  Synthetically generated peptide
  VARIANT (1)...(20): Xaa = Any Amino Acid
PGTCGXEICAXYAACTXGXC

SEQ ID NO: 3200 - protein, 20 aa, Artificial Sequence
  Synthetically generated peptide
  VARIANT (1)...(20): Xaa = Any Amino Acid
PGTCGXEICAXYAACTXGCX

SEQ ID NO: 3201 - protein, 19 aa, Artificial Sequence
  Synthetically generated peptide
  VARIANT (1)...(19): Xaa = Any Amino Acid
PGTCGXEICAXYAACTGXC

SEQ ID NO: 3202 - protein, 20 aa, Artificial Sequence
  Synthetically generated peptide
  VARIANT (1)...(20): Xaa = Any Amino Acid
PGTCGXEICAXYAACTGXXC

SEQ ID NO: 3203 - protein, 20 aa, Artificial Sequence
  Synthetically generated peptide
  VARIANT (1)...(20): Xaa = Any Amino Acid
PGTCGXEICAXYAACTGXCX

SEQ ID NO: 3204 - protein, 19 aa, Artificial Sequence
  Synthetically generated peptide
  VARIANT (1)...(19): Xaa = Any Amino Acid
PGTCGXEICAXYAACTGCX

SEQ ID NO: 3205 - protein, 20 aa, Artificial Sequence
  Synthetically generated peptide
  VARIANT (1)...(20): Xaa = Any Amino Acid
PGTCGXEICAXYAACTGCXX

SEQ ID NO: 3206 - protein, 18 aa, Artificial Sequence
  Synthetically generated peptide
  VARIANT (1)...(18): Xaa = Any Amino Acid
PGTCGXEICAYXAACTGC

SEQ ID NO: 3207 - protein, 19 aa, Artificial Sequence
  Synthetically generated peptide
  VARIANT (1)...(19): Xaa = Any Amino Acid
PGTCGXEICAYXXAACTGC

SEQ ID NO: 3208 - protein, 20 aa, Artificial Sequence
  Synthetically generated peptide
  VARIANT (1)...(20): Xaa = Any Amino Acid
PGTCGXEICAYXXXAACTGC

SEQ ID NO: 3209 - protein, 20 aa, Artificial Sequence
  Synthetically generated peptide
  VARIANT (1)...(20): Xaa = Any Amino Acid
PGTCGXEICAYXXAXACTGC

SEQ ID NO: 3210 - protein, 20 aa, Artificial Sequence
  Synthetically generated peptide
  VARIANT (1)...(20): Xaa = Any Amino Acid
PGTCGXEICAYXXAAXCTGC

SEQ ID NO: 3211 - protein, 20 aa, Artificial Sequence
  Synthetically generated peptide
  VARIANT (1)...(20): Xaa = Any Amino Acid
PGTCGXEICAYXXAACXTGC

SEQ ID NO: 3212 - protein, 20 aa, Artificial Sequence
  Synthetically generated peptide
  VARIANT (1)...(20): Xaa = Any Amino Acid
PGTCGXEICAYXXAACTXGC

SEQ ID NO: 3213 - protein, 20 aa, Artificial Sequence
  Synthetically generated peptide
  VARIANT (1)...(20): Xaa = Any Amino Acid
PGTCGXEICAYXXAACTGXC

SEQ ID NO: 3214 - protein, 20 aa, Artificial Sequence
  Synthetically generated peptide
  VARIANT (1)...(20): Xaa = Any Amino Acid
PGTCGXEICAYXXAACTGCX

SEQ ID NO: 3215 - protein, 19 aa, Artificial Sequence
  Synthetically generated peptide
  VARIANT (1)...(19): Xaa = Any Amino Acid
PGTCGXEICAYXAXACTGC

SEQ ID NO: 3216 - protein, 20 aa, Artificial Sequence
  Synthetically generated peptide
  VARIANT (1)...(20): Xaa = Any Amino Acid
PGTCGXEICAYXAXXACTGC

SEQ ID NO: 3217 - protein, 20 aa, Artificial Sequence
  Synthetically generated peptide
  VARIANT (1)...(20): Xaa = Any Amino Acid
PGTCGXEICAYXAXAXCTGC

SEQ ID NO: 3218 - protein, 20 aa, Artificial Sequence
  Synthetically generated peptide
  VARIANT (1)...(20): Xaa = Any Amino Acid
PGTCGXEICAYXAXACXTGC

SEQ ID NO: 3219 - protein, 20 aa, Artificial Sequence
  Synthetically generated peptide
  VARIANT (1)...(20): Xaa = Any Amino Acid
PGTCGXEICAYXAXACTXGC

SEQ ID NO: 3220 - protein, 20 aa, Artificial Sequence
  Synthetically generated peptide
  VARIANT (1)...(20): Xaa = Any Amino Acid
PGTCGXEICAYXAXACTGXC

SEQ ID NO: 3221 - protein, 20 aa, Artificial Sequence
  Synthetically generated peptide
  VARIANT (1)...(20): Xaa = Any Amino Acid
PGTCGXEICAYXAXACTGCX

SEQ ID NO: 3222 - protein, 19 aa, Artificial Sequence
  Synthetically generated peptide
  VARIANT (1)...(19): Xaa = Any Amino Acid
PGTCGXEICAYXAAXCTGC

SEQ ID NO: 3223 - protein, 20 aa, Artificial Sequence
  Synthetically generated peptide
  VARIANT (1)...(20): Xaa = Any Amino Acid
PGTCGXEICAYXAAXXCTGC

SEQ ID NO: 3224 - protein, 20 aa, Artificial Sequence
  Synthetically generated peptide
  VARIANT (1)...(20): Xaa = Any Amino Acid
PGTCGXEICAYXAAXCXTGC

SEQ ID NO: 3225 - protein, 20 aa, Artificial Sequence
  Synthetically generated peptide
  VARIANT (1)...(20): Xaa = Any Amino Acid
PGTCGXEICAYXAAXCTXGC

SEQ ID NO: 3226 - protein, 20 aa, Artificial Sequence
  Synthetically generated peptide
  VARIANT (1)...(20): Xaa = Any Amino Acid
PGTCGXEICAYXAAXCTGXC

SEQ ID NO: 3227 - protein, 20 aa, Artificial Sequence
  Synthetically generated peptide
  VARIANT (1)...(20): Xaa = Any Amino Acid
PGTCGXEICAYXAAXCTGCX

SEQ ID NO: 3228 - protein, 19 aa, Artificial Sequence
  Synthetically generated peptide
  VARIANT (1)...(19): Xaa = Any Amino Acid
PGTCGXEICAYXAACXTGC

SEQ ID NO: 3229 - protein, 20 aa, Artificial Sequence
  Synthetically generated peptide
  VARIANT (1)...(20): Xaa = Any Amino Acid
PGTCGXEICAYXAACXXTGC

SEQ ID NO: 3230 - protein, 20 aa, Artificial Sequence
  Synthetically generated peptide
  VARIANT (1)...(20): Xaa = Any Amino Acid
PGTCGXEICAYXAACXTXGC

SEQ ID NO: 3231 - protein, 20 aa, Artificial Sequence
  Synthetically generated peptide
  VARIANT (1)...(20): Xaa = Any Amino Acid
PGTCGXEICAYXAACXTGXC

SEQ ID NO: 3232 - protein, 20 aa, Artificial Sequence
  Synthetically generated peptide
  VARIANT (1)...(20): Xaa = Any Amino Acid
PGTCGXEICAYXAACXTGCX

SEQ ID NO: 3233 - protein, 19 aa, Artificial Sequence
  Synthetically generated peptide
  VARIANT (1)...(19): Xaa = Any Amino Acid
PGTCGXEICAYXAACTXGC

SEQ ID NO: 3234 - protein, 20 aa, Artificial Sequence
  Synthetically generated peptide
  VARIANT (1)...(20): Xaa = Any Amino Acid
PGTCGXEICAYXAACTXXGC

SEQ ID NO: 3235 - protein, 20 aa, Artificial Sequence
  Synthetically generated peptide
  VARIANT (1)...(20): Xaa = Any Amino Acid
PGTCGXEICAYXAACTXGXC

SEQ ID NO: 3236 - protein, 20 aa, Artificial Sequence
  Synthetically generated peptide
  VARIANT (1)...(20): Xaa = Any Amino Acid
PGTCGXEICAYXAACTXGCX

SEQ ID NO: 3237 - protein, 19 aa, Artificial Sequence
  Synthetically generated peptide
  VARIANT (1)...(19): Xaa = Any Amino Acid
PGTCGXEICAYXAACTGXC

SEQ ID NO: 3238 - protein, 20 aa, Artificial Sequence
  Synthetically generated peptide
  VARIANT (1)...(20): Xaa = Any Amino Acid
PGTCGXEICAYXAACTGXXC

SEQ ID NO: 3239 - protein, 20 aa, Artificial Sequence
  Synthetically generated peptide
  VARIANT (1)...(20): Xaa = Any Amino Acid
PGTCGXEICAYXAACTGXCX

SEQ ID NO: 3240 - protein, 19 aa, Artificial Sequence
  Synthetically generated peptide
  VARIANT (1)...(19): Xaa = Any Amino Acid
PGTCGXEICAYXAACTGCX

SEQ ID NO: 3241 - protein, 20 aa, Artificial Sequence
  Synthetically generated peptide
  VARIANT (1)...(20): Xaa = Any Amino Acid
PGTCGXEICAYXAACTGCXX

SEQ ID NO: 3242 - protein, 18 aa, Artificial Sequence
  Synthetically generated peptide
  VARIANT (1)...(18): Xaa = Any Amino Acid
PGTCGXEICAYAXACTGC

SEQ ID NO: 3243 - protein, 19 aa, Artificial Sequence
  Synthetically generated peptide
  VARIANT (1)...(19): Xaa = Any Amino Acid
PGTCGXEICAYAXXACTGC

SEQ ID NO: 3244 - protein, 20 aa, Artificial Sequence
  Synthetically generated peptide
  VARIANT (1)...(20): Xaa = Any Amino Acid
PGTCGXEICAYAXXXACTGC

SEQ ID NO: 3245 - protein, 20 aa, Artificial Sequence
  Synthetically generated peptide
  VARIANT (1)...(20): Xaa = Any Amino Acid
PGTCGXEICAYAXXAXCTGC

SEQ ID NO: 3246 - protein, 20 aa, Artificial Sequence
  Synthetically generated peptide
  VARIANT (1)...(20): Xaa = Any Amino Acid
PGTCGXEICAYAXXACXTGC

SEQ ID NO: 3247 - protein, 20 aa, Artificial Sequence
  Synthetically generated peptide
  VARIANT (1)...(20): Xaa = Any Amino Acid
PGTCGXEICAYAXXACTXGC

SEQ ID NO: 3248 - protein, 20 aa, Artificial Sequence
  Synthetically generated peptide
  VARIANT (1)...(20): Xaa = Any Amino Acid
PGTCGXEICAYAXXACTGXC

SEQ ID NO: 3249 - protein, 20 aa, Artificial Sequence
  Synthetically generated peptide
  VARIANT (1)...(20): Xaa = Any Amino Acid
PGTCGXEICAYAXXACTGCX

SEQ ID NO: 3250 - protein, 19 aa, Artificial Sequence
  Synthetically generated peptide
  VARIANT (1)...(19): Xaa = Any Amino Acid
PGTCGXEICAYAXAXCTGC

SEQ ID NO: 3251 - protein, 20 aa, Artificial Sequence
  Synthetically generated peptide
  VARIANT (1)...(20): Xaa = Any Amino Acid
PGTCGXEICAYAXAXXCTGC

SEQ ID NO: 3252 - protein, 20 aa, Artificial Sequence
  Synthetically generated peptide
  VARIANT (1)...(20): Xaa = Any Amino Acid
PGTCGXEICAYAXAXCXTGC

SEQ ID NO: 3253 - protein, 20 aa, Artificial Sequence
  Synthetically generated peptide
  VARIANT (1)...(20): Xaa = Any Amino Acid
PGTCGXEICAYAXAXCTXGC

SEQ ID NO: 3254 - protein, 20 aa, Artificial Sequence
  Synthetically generated peptide
  VARIANT (1)...(20): Xaa = Any Amino Acid
PGTCGXEICAYAXAXCTGXC

SEQ ID NO: 3255 - protein, 20 aa, Artificial Sequence
  Synthetically generated peptide
  VARIANT (1)...(20): Xaa = Any Amino Acid
PGTCGXEICAYAXAXCTGCX

SEQ ID NO: 3256 - protein, 19 aa, Artificial Sequence
  Synthetically generated peptide
  VARIANT (1)...(19): Xaa = Any Amino Acid
PGTCGXEICAYAXACXTGC

SEQ ID NO: 3257 - protein, 20 aa, Artificial Sequence
  Synthetically generated peptide
  VARIANT (1)...(20): Xaa = Any Amino Acid
PGTCGXEICAYAXACXXTGC

SEQ ID NO: 3258 - protein, 20 aa, Artificial Sequence
  Synthetically generated peptide
  VARIANT (1)...(20): Xaa = Any Amino Acid
PGTCGXEICAYAXACXTXGC

SEQ ID NO: 3259 - protein, 20 aa, Artificial Sequence
  Synthetically generated peptide
  VARIANT (1)...(20): Xaa = Any Amino Acid
PGTCGXEICAYAXACXTGXC

SEQ ID NO: 3260 - protein, 20 aa, Artificial Sequence
  Synthetically generated peptide
  VARIANT (1)...(20): Xaa = Any Amino Acid
PGTCGXEICAYAXACXTGCX

SEQ ID NO: 3261 - protein, 19 aa, Artificial Sequence
  Synthetically generated peptide
  VARIANT (1)...(19): Xaa = Any Amino Acid
PGTCGXEICAYAXACTXGC

SEQ ID NO: 3262 - protein, 20 aa, Artificial Sequence
  Synthetically generated peptide
  VARIANT (1)...(20): Xaa = Any Amino Acid
PGTCGXEICAYAXACTXXGC

SEQ ID NO: 3263 - protein, 20 aa, Artificial Sequence
  Synthetically generated peptide
  VARIANT (1)...(20): Xaa = Any Amino Acid
PGTCGXEICAYAXACTXGXC

SEQ ID NO: 3264 - protein, 20 aa, Artificial Sequence
  Synthetically generated peptide
  VARIANT (1)...(20): Xaa = Any Amino Acid
PGTCGXEICAYAXACTXGCX

SEQ ID NO: 3265 - protein, 19 aa, Artificial Sequence
  Synthetically generated peptide
  VARIANT (1)...(19): Xaa = Any Amino Acid
PGTCGXEICAYAXACTGXC

SEQ ID NO: 3266 - protein, 20 aa, Artificial Sequence
  Synthetically generated peptide
  VARIANT (1)...(20): Xaa = Any Amino Acid
PGTCGXEICAYAXACTGXXC

SEQ ID NO: 3267 - protein, 20 aa, Artificial Sequence
  Synthetically generated peptide
  VARIANT (1)...(20): Xaa = Any Amino Acid
PGTCGXEICAYAXACTGXCX

SEQ ID NO: 3268 - protein, 19 aa, Artificial Sequence
  Synthetically generated peptide
  VARIANT (1)...(19): Xaa = Any Amino Acid
PGTCGXEICAYAXACTGCX

SEQ ID NO: 3269 - protein, 20 aa, Artificial Sequence
  Synthetically generated peptide
  VARIANT (1)...(20): Xaa = Any Amino Acid
PGTCGXEICAYAXACTGCXX

SEQ ID NO: 3270 - protein, 18 aa, Artificial Sequence
  Synthetically generated peptide
  VARIANT (1)...(18): Xaa = Any Amino Acid
PGTCGXEICAYAAXCTGC

SEQ ID NO: 3271 - protein, 19 aa, Artificial Sequence
  Synthetically generated peptide
  VARIANT (1)...(19): Xaa = Any Amino Acid
PGTCGXEICAYAAXXCTGC

SEQ ID NO: 3272 - protein, 20 aa, Artificial Sequence
  Synthetically generated peptide
  VARIANT (1)...(20): Xaa = Any Amino Acid
PGTCGXEICAYAAXXXCTGC

SEQ ID NO: 3273 - protein, 20 aa, Artificial Sequence
  Synthetically generated peptide
  VARIANT (1)...(20): Xaa = Any Amino Acid
PGTCGXEICAYAAXXCXTGC

SEQ ID NO: 3274 - protein, 20 aa, Artificial Sequence
  Synthetically generated peptide
  VARIANT (1)...(20): Xaa = Any Amino Acid
PGTCGXEICAYAAXXCTXGC

SEQ ID NO: 3275 - protein, 20 aa, Artificial Sequence
  Synthetically generated peptide
  VARIANT (1)...(20): Xaa = Any Amino Acid
PGTCGXEICAYAAXXCTGXC

SEQ ID NO: 3276 - protein, 20 aa, Artificial Sequence
  Synthetically generated peptide
  VARIANT (1)...(20): Xaa = Any Amino Acid
PGTCGXEICAYAAXXCTGCX

SEQ ID NO: 3277 - protein, 19 aa, Artificial Sequence
  Synthetically generated peptide
  VARIANT (1)...(19): Xaa = Any Amino Acid
PGTCGXEICAYAAXCXTGC

SEQ ID NO: 3278 - protein, 20 aa, Artificial Sequence
  Synthetically generated peptide
  VARIANT (1)...(20): Xaa = Any Amino Acid
PGTCGXEICAYAAXCXXTGC

SEQ ID NO: 3279 - protein, 20 aa, Artificial Sequence
  Synthetically generated peptide
  VARIANT (1)...(20): Xaa = Any Amino Acid
PGTCGXEICAYAAXCXTXGC

SEQ ID NO: 3280 - protein, 20 aa, Artificial Sequence
  Synthetically generated peptide
  VARIANT (1)...(20): Xaa = Any Amino Acid
PGTCGXEICAYAAXCXTGXC

SEQ ID NO: 3281 - protein, 20 aa, Artificial Sequence
  Synthetically generated peptide
  VARIANT (1)...(20): Xaa = Any Amino Acid
PGTCGXEICAYAAXCXTGCX

SEQ ID NO: 3282 - protein, 19 aa, Artificial Sequence
  Synthetically generated peptide
  VARIANT (1)...(19): Xaa = Any Amino Acid
PGTCGXEICAYAAXCTXGC

SEQ ID NO: 3283 - protein, 20 aa, Artificial Sequence
  Synthetically generated peptide
  VARIANT (1)...(20): Xaa = Any Amino Acid
PGTCGXEICAYAAXCTXXGC

SEQ ID NO: 3284 - protein, 20 aa, Artificial Sequence
  Synthetically generated peptide
  VARIANT (1)...(20): Xaa = Any Amino Acid
PGTCGXEICAYAAXCTXGXC

SEQ ID NO: 3285 - protein, 20 aa, Artificial Sequence
  Synthetically generated peptide
  VARIANT (1)...(20): Xaa = Any Amino Acid
PGTCGXEICAYAAXCTXGCX

SEQ ID NO: 3286 - protein, 19 aa, Artificial Sequence
  Synthetically generated peptide
  VARIANT (1)...(19): Xaa = Any Amino Acid
PGTCGXEICAYAAXCTGXC

SEQ ID NO: 3287 - protein, 20 aa, Artificial Sequence
  Synthetically generated peptide
  VARIANT (1)...(20): Xaa = Any Amino Acid
PGTCGXEICAYAAXCTGXXC

SEQ ID NO: 3288 - protein, 20 aa, Artificial Sequence
  Synthetically generated peptide
  VARIANT (1)...(20): Xaa = Any Amino Acid
PGTCGXEICAYAAXCTGXCX

SEQ ID NO: 3289 - protein, 19 aa, Artificial Sequence
  Synthetically generated peptide
  VARIANT (1)...(19): Xaa = Any Amino Acid
PGTCGXEICAYAAXCTGCX

SEQ ID NO: 3290 - protein, 20 aa, Artificial Sequence
  Synthetically generated peptide
  VARIANT (1)...(20): Xaa = Any Amino Acid
PGTCGXEICAYAAXCTGCXX

SEQ ID NO: 3291 - protein, 18 aa, Artificial Sequence
  Synthetically generated peptide
  VARIANT (1)...(18): Xaa = Any Amino Acid
PGTCGXEICAYAACXTGC

SEQ ID NO: 3292 - protein, 19 aa, Artificial Sequence
  Synthetically generated peptide
  VARIANT (1)...(19): Xaa = Any Amino Acid
PGTCGXEICAYAACXXTGC

SEQ ID NO: 3293 - protein, 20 aa, Artificial Sequence
  Synthetically generated peptide
  VARIANT (1)...(20): Xaa = Any Amino Acid
PGTCGXEICAYAACXXXTGC

SEQ ID NO: 3294 - protein, 20 aa, Artificial Sequence
  Synthetically generated peptide
  VARIANT (1)...(20): Xaa = Any Amino Acid
PGTCGXEICAYAACXXTXGC

SEQ ID NO: 3295 - protein, 20 aa, Artificial Sequence
  Synthetically generated peptide
  VARIANT (1)...(20): Xaa = Any Amino Acid
PGTCGXEICAYAACXXTGXC

SEQ ID NO: 3296 - protein, 20 aa, Artificial Sequence
  Synthetically generated peptide
  VARIANT (1)...(20): Xaa = Any Amino Acid
PGTCGXEICAYAACXXTGCX

SEQ ID NO: 3297 - protein, 19 aa, Artificial Sequence
  Synthetically generated peptide
  VARIANT (1)...(19): Xaa = Any Amino Acid
PGTCGXEICAYAACXTXGC

SEQ ID NO: 3298 - protein, 20 aa, Artificial Sequence
  Synthetically generated peptide
  VARIANT (1)...(20): Xaa = Any Amino Acid
PGTCGXEICAYAACXTXXGC

SEQ ID NO: 3299 - protein, 20 aa, Artificial Sequence
  Synthetically generated peptide
  VARIANT (1)...(20): Xaa = Any Amino Acid
PGTCGXEICAYAACXTXGXC

SEQ ID NO: 3300 - protein, 20 aa, Artificial Sequence
  Synthetically generated peptide
  VARIANT (1)...(20): Xaa = Any Amino Acid
PGTCGXEICAYAACXTXGCX

SEQ ID NO: 3301 - protein, 19 aa, Artificial Sequence
  Synthetically generated peptide
  VARIANT (1)...(19): Xaa = Any Amino Acid
PGTCGXEICAYAACXTGXC

SEQ ID NO: 3302 - protein, 20 aa, Artificial Sequence
  Synthetically generated peptide
  VARIANT (1)...(20): Xaa = Any Amino Acid
PGTCGXEICAYAACXTGXXC

SEQ ID NO: 3303 - protein, 20 aa, Artificial Sequence
  Synthetically generated peptide
  VARIANT (1)...(20): Xaa = Any Amino Acid
PGTCGXEICAYAACXTGXCX

SEQ ID NO: 3304 - protein, 19 aa, Artificial Sequence
  Synthetically generated peptide
  VARIANT (1)...(19): Xaa = Any Amino Acid
PGTCGXEICAYAACXTGCX

SEQ ID NO: 3305 - protein, 20 aa, Artificial Sequence
  Synthetically generated peptide
  VARIANT (1)...(20): Xaa = Any Amino Acid
PGTCGXEICAYAACXTGCXX

SEQ ID NO: 3306 - protein, 18 aa, Artificial Sequence
  Synthetically generated peptide
  VARIANT (1)...(18): Xaa = Any Amino Acid
PGTCGXEICAYAACTXGC

SEQ ID NO: 3307 - protein, 19 aa, Artificial Sequence
  Synthetically generated peptide
  VARIANT (1)...(19): Xaa = Any Amino Acid
PGTCGXEICAYAACTXXGC

SEQ ID NO: 3308 - protein, 20 aa, Artificial Sequence
  Synthetically generated peptide
  VARIANT (1)...(20): Xaa = Any Amino Acid
PGTCGXEICAYAACTXXXGC

SEQ ID NO: 3309 - protein, 20 aa, Artificial Sequence
  Synthetically generated peptide
  VARIANT (1)...(20): Xaa = Any Amino Acid
PGTCGXEICAYAACTXXGXC

SEQ ID NO: 3310 - protein, 20 aa, Artificial Sequence
  Synthetically generated peptide
  VARIANT (1)...(20): Xaa = Any Amino Acid
PGTCGXEICAYAACTXXGCX

SEQ ID NO: 3311 - protein, 19 aa, Artificial Sequence
  Synthetically generated peptide
  VARIANT (1)...(19): Xaa = Any Amino Acid
PGTCGXEICAYAACTXGXC

SEQ ID NO: 3312 - protein, 20 aa, Artificial Sequence
  Synthetically generated peptide
  VARIANT (1)...(20): Xaa = Any Amino Acid
PGTCGXEICAYAACTXGXXC

SEQ ID NO: 3313 - protein, 20 aa, Artificial Sequence
  Synthetically generated peptide
  VARIANT (1)...(20): Xaa = Any Amino Acid
PGTCGXEICAYAACTXGXCX

SEQ ID NO: 3314 - protein, 19 aa, Artificial Sequence
  Synthetically generated peptide
  VARIANT (1)...(19): Xaa = Any Amino Acid
PGTCGXEICAYAACTXGCX

SEQ ID NO: 3315 - protein, 20 aa, Artificial Sequence
  Synthetically generated peptide
  VARIANT (1)...(20): Xaa = Any Amino Acid
PGTCGXEICAYAACTXGCXX

SEQ ID NO: 3316 - protein, 18 aa, Artificial Sequence
  Synthetically generated peptide
  VARIANT (1)...(18): Xaa = Any Amino Acid
PGTCGXEICAYAACTGXC

SEQ ID NO: 3317 - protein, 19 aa, Artificial Sequence
  Synthetically generated peptide
  VARIANT (1)...(19): Xaa = Any Amino Acid
PGTCGXEICAYAACTGXXC

SEQ ID NO: 3318 - protein, 20 aa, Artificial Sequence
  Synthetically generated peptide
  VARIANT (1)...(20): Xaa = Any Amino Acid
PGTCGXEICAYAACTGXXXC

SEQ ID NO: 3319 - protein, 20 aa, Artificial Sequence
  Synthetically generated peptide
  VARIANT (1)...(20): Xaa = Any Amino Acid
PGTCGXEICAYAACTGXXCX

SEQ ID NO: 3320 - protein, 19 aa, Artificial Sequence
  Synthetically generated peptide
  VARIANT (1)...(19): Xaa = Any Amino Acid
PGTCGXEICAYAACTGXCX

SEQ ID NO: 3321 - protein, 20 aa, Artificial Sequence
  Synthetically generated peptide
  VARIANT (1)...(20): Xaa = Any Amino Acid
PGTCGXEICAYAACTGXCXX

SEQ ID NO: 3322 - protein, 18 aa, Artificial Sequence
  Synthetically generated peptide
  VARIANT (1)...(18): Xaa = Any Amino Acid
PGTCGXEICAYAACTGCX

SEQ ID NO: 3323 - protein, 19 aa, Artificial Sequence
  Synthetically generated peptide
  VARIANT (1)...(19): Xaa = Any Amino Acid
PGTCGXEICAYAACTGCXX

SEQ ID NO: 3324 - protein, 20 aa, Artificial Sequence
  Synthetically generated peptide
  VARIANT (1)...(20): Xaa = Any Amino Acid
PGTCGXEICAYAACTGCXXX

SEQ ID NO: 3325 - protein, 17 aa, Artificial Sequence
  Synthetically generated peptide
  VARIANT (1)...(17): Xaa = Any Amino Acid
PGTCGEXICAYAACTGC

SEQ ID NO: 3326 - protein, 18 aa, Artificial Sequence
  Synthetically generated peptide
  VARIANT (1)...(18): Xaa = Any Amino Acid
PGTCGEXXICAYAACTGC

SEQ ID NO: 3327 - protein, 19 aa, Artificial Sequence
  Synthetically generated peptide
  VARIANT (1)...(19): Xaa = Any Amino Acid
PGTCGEXXXICAYAACTGC

SEQ ID NO: 3328 - protein, 20 aa, Artificial Sequence
  Synthetically generated peptide
  VARIANT (1)...(20): Xaa = Any Amino Acid
PGTCGEXXXXICAYAACTGC

SEQ ID NO: 3329 - protein, 20 aa, Artificial Sequence
  Synthetically generated peptide
  VARIANT (1)...(20): Xaa = Any Amino Acid
PGTCGEXXXIXCAYAACTGC

SEQ ID NO: 3330 - protein, 20 aa, Artificial Sequence
  Synthetically generated peptide
  VARIANT (1)...(20): Xaa = Any Amino Acid
PGTCGEXXXICXAYAACTGC

SEQ ID NO: 3331 - protein, 20 aa, Artificial Sequence
  Synthetically generated peptide
  VARIANT (1)...(20): Xaa = Any Amino Acid
PGTCGEXXXICAXYAACTGC

SEQ ID NO: 3332 - protein, 20 aa, Artificial Sequence
  Synthetically generated peptide
  VARIANT (1)...(20): Xaa = Any Amino Acid
PGTCGEXXXICAYXAACTGC

SEQ ID NO: 3333 - protein, 20 aa, Artificial Sequence
  Synthetically generated peptide
  VARIANT (1)...(20): Xaa = Any Amino Acid
PGTCGEXXXICAYAXACTGC

SEQ ID NO: 3334 - protein, 20 aa, Artificial Sequence
  Synthetically generated peptide
  VARIANT (1)...(20): Xaa = Any Amino Acid
PGTCGEXXXICAYAAXCTGC

SEQ ID NO: 3335 - protein, 20 aa, Artificial Sequence
  Synthetically generated peptide
  VARIANT (1)...(20): Xaa = Any Amino Acid
PGTCGEXXXICAYAACXTGC

SEQ ID NO: 3336 - protein, 20 aa, Artificial Sequence
  Synthetically generated peptide
  VARIANT (1)...(20): Xaa = Any Amino Acid
PGTCGEXXXICAYAACTXGC

SEQ ID NO: 3337 - protein, 20 aa, Artificial Sequence
  Synthetically generated peptide
  VARIANT (1)...(20): Xaa = Any Amino Acid
PGTCGEXXXICAYAACTGXC

SEQ ID NO: 3338 - protein, 20 aa, Artificial Sequence
  Synthetically generated peptide
  VARIANT (1)...(20): Xaa = Any Amino Acid
PGTCGEXXXICAYAACTGCX

SEQ ID NO: 3339 - protein, 19 aa, Artificial Sequence
  Synthetically generated peptide
  VARIANT (1)...(19): Xaa = Any Amino Acid
PGTCGEXXIXCAYAACTGC

SEQ ID NO: 3340 - protein, 20 aa, Artificial Sequence
  Synthetically generated peptide
  VARIANT (1)...(20): Xaa = Any Amino Acid
PGTCGEXXIXXCAYAACTGC

SEQ ID NO: 3341 - protein, 20 aa, Artificial Sequence
  Synthetically generated peptide
  VARIANT (1)...(20): Xaa = Any Amino Acid
PGTCGEXXIXCXAYAACTGC

SEQ ID NO: 3342 - protein, 20 aa, Artificial Sequence
  Synthetically generated peptide
  VARIANT (1)...(20): Xaa = Any Amino Acid
PGTCGEXXIXCAXYAACTGC

SEQ ID NO: 3343 - protein, 20 aa, Artificial Sequence
  Synthetically generated peptide
  VARIANT (1)...(20): Xaa = Any Amino Acid
PGTCGEXXIXCAYXAACTGC

SEQ ID NO: 3344 - protein, 20 aa, Artificial Sequence
  Synthetically generated peptide
  VARIANT (1)...(20): Xaa = Any Amino Acid
PGTCGEXXIXCAYAXACTGC

SEQ ID NO: 3345 - protein, 20 aa, Artificial Sequence
  Synthetically generated peptide
  VARIANT (1)...(20): Xaa = Any Amino Acid
PGTCGEXXIXCAYAAXCTGC

SEQ ID NO: 3346 - protein, 20 aa, Artificial Sequence
  Synthetically generated peptide
  VARIANT (1)...(20): Xaa = Any Amino Acid
PGTCGEXXIXCAYAACXTGC

SEQ ID NO: 3347 - protein, 20 aa, Artificial Sequence
  Synthetically generated peptide
  VARIANT (1)...(20): Xaa = Any Amino Acid
PGTCGEXXIXCAYAACTXGC

SEQ ID NO: 3348 - protein, 20 aa, Artificial Sequence
  Synthetically generated peptide
  VARIANT (1)...(20): Xaa = Any Amino Acid
PGTCGEXXIXCAYAACTGXC

SEQ ID NO: 3349 - protein, 20 aa, Artificial Sequence
  Synthetically generated peptide
  VARIANT (1)...(20): Xaa = Any Amino Acid
PGTCGEXXIXCAYAACTGCX

SEQ ID NO: 3350 - protein, 19 aa, Artificial Sequence
  Synthetically generated peptide
  VARIANT (1)...(19): Xaa = Any Amino Acid
PGTCGEXXICXAYAACTGC

SEQ ID NO: 3351 - protein, 20 aa, Artificial Sequence
  Synthetically generated peptide
  VARIANT (1)...(20): Xaa = Any Amino Acid
PGTCGEXXICXXAYAACTGC

SEQ ID NO: 3352 - protein, 20 aa, Artificial Sequence
  Synthetically generated peptide
  VARIANT (1)...(20): Xaa = Any Amino Acid
PGTCGEXXICXAXYAACTGC

SEQ ID NO: 3353 - protein, 20 aa, Artificial Sequence
  Synthetically generated peptide
  VARIANT (1)...(20): Xaa = Any Amino Acid
PGTCGEXXICXAYXAACTGC

SEQ ID NO: 3354 - protein, 20 aa, Artificial Sequence
  Synthetically generated peptide
  VARIANT (1)...(20): Xaa = Any Amino Acid
PGTCGEXXICXAYAXACTGC

SEQ ID NO: 3355 - protein, 20 aa, Artificial Sequence
  Synthetically generated peptide
  VARIANT (1)...(20): Xaa = Any Amino Acid
PGTCGEXXICXAYAAXCTGC

SEQ ID NO: 3356 - protein, 20 aa, Artificial Sequence
  Synthetically generated peptide
  VARIANT (1)...(20): Xaa = Any Amino Acid
PGTCGEXXICXAYAACXTGC

SEQ ID NO: 3357 - protein, 20 aa, Artificial Sequence
  Synthetically generated peptide
  VARIANT (1)...(20): Xaa = Any Amino Acid
PGTCGEXXICXAYAACTXGC

SEQ ID NO: 3358 - protein, 20 aa, Artificial Sequence
  Synthetically generated peptide
  VARIANT (1)...(20): Xaa = Any Amino Acid
PGTCGEXXICXAYAACTGXC

SEQ ID NO: 3359 - protein, 20 aa, Artificial Sequence
  Synthetically generated peptide
  VARIANT (1)...(20): Xaa = Any Amino Acid
PGTCGEXXICXAYAACTGCX

SEQ ID NO: 3360 - protein, 19 aa, Artificial Sequence
  Synthetically generated peptide
  VARIANT (1)...(19): Xaa = Any Amino Acid
PGTCGEXXICAXYAACTGC

SEQ ID NO: 3361 - protein, 20 aa, Artificial Sequence
  Synthetically generated peptide
  VARIANT (1)...(20): Xaa = Any Amino Acid
PGTCGEXXICAXXYAACTGC

SEQ ID NO: 3362 - protein, 20 aa, Artificial Sequence
  Synthetically generated peptide
  VARIANT (1)...(20): Xaa = Any Amino Acid
PGTCGEXXICAXYXAACTGC

SEQ ID NO: 3363 - protein, 20 aa, Artificial Sequence
  Synthetically generated peptide
  VARIANT (1)...(20): Xaa = Any Amino Acid
PGTCGEXXICAXYAXACTGC

SEQ ID NO: 3364 - protein, 20 aa, Artificial Sequence
  Synthetically generated peptide
  VARIANT (1)...(20): Xaa = Any Amino Acid
PGTCGEXXICAXYAAXCTGC

SEQ ID NO: 3365 - protein, 20 aa, Artificial Sequence
  Synthetically generated peptide
  VARIANT (1)...(20): Xaa = Any Amino Acid
PGTCGEXXICAXYAACXTGC

SEQ ID NO: 3366 - protein, 20 aa, Artificial Sequence
  Synthetically generated peptide
  VARIANT (1)...(20): Xaa = Any Amino Acid
PGTCGEXXICAXYAACTXGC

SEQ ID NO: 3367 - protein, 20 aa, Artificial Sequence
  Synthetically generated peptide
  VARIANT (1)...(20): Xaa = Any Amino Acid
PGTCGEXXICAXYAACTGXC

SEQ ID NO: 3368 - protein, 20 aa, Artificial Sequence
  Synthetically generated peptide
  VARIANT (1)...(20): Xaa = Any Amino Acid
PGTCGEXXICAXYAACTGCX

SEQ ID NO: 3369 - protein, 19 aa, Artificial Sequence
  Synthetically generated peptide
  VARIANT (1)...(19): Xaa = Any Amino Acid
PGTCGEXXICAYXAACTGC

SEQ ID NO: 3370 - protein, 20 aa, Artificial Sequence
  Synthetically generated peptide
  VARIANT (1)...(20): Xaa = Any Amino Acid
PGTCGEXXICAYXXAACTGC

SEQ ID NO: 3371 - protein, 20 aa, Artificial Sequence
  Synthetically generated peptide
  VARIANT (1)...(20): Xaa = Any Amino Acid
PGTCGEXXICAYXAXACTGC

SEQ ID NO: 3372 - protein, 20 aa, Artificial Sequence
  Synthetically generated peptide
  VARIANT (1)...(20): Xaa = Any Amino Acid
PGTCGEXXICAYXAAXCTGC

SEQ ID NO: 3373 - protein, 20 aa, Artificial Sequence
  Synthetically generated peptide
  VARIANT (1)...(20): Xaa = Any Amino Acid
PGTCGEXXICAYXAACXTGC

SEQ ID NO: 3374 - protein, 20 aa, Artificial Sequence
  Synthetically generated peptide
  VARIANT (1)...(20): Xaa = Any Amino Acid
PGTCGEXXICAYXAACTXGC

SEQ ID NO: 3375 - protein, 20 aa, Artificial Sequence
  Synthetically generated peptide
  VARIANT (1)...(20): Xaa = Any Amino Acid
PGTCGEXXICAYXAACTGXC

SEQ ID NO: 3376 - protein, 20 aa, Artificial Sequence
  Synthetically generated peptide
  VARIANT (1)...(20): Xaa = Any Amino Acid
PGTCGEXXICAYXAACTGCX

SEQ ID NO: 3377 - protein, 19 aa, Artificial Sequence
  Synthetically generated peptide
  VARIANT (1)...(19): Xaa = Any Amino Acid
PGTCGEXXICAYAXACTGC

SEQ ID NO: 3378 - protein, 20 aa, Artificial Sequence
  Synthetically generated peptide
  VARIANT (1)...(20): Xaa = Any Amino Acid
PGTCGEXXICAYAXXACTGC

SEQ ID NO: 3379 - protein, 20 aa, Artificial Sequence
  Synthetically generated peptide
  VARIANT (1)...(20): Xaa = Any Amino Acid
PGTCGEXXICAYAXAXCTGC

SEQ ID NO: 3380 - protein, 20 aa, Artificial Sequence
  Synthetically generated peptide
  VARIANT (1)...(20): Xaa = Any Amino Acid
PGTCGEXXICAYAXACXTGC

SEQ ID NO: 3381 - protein, 20 aa, Artificial Sequence
  Synthetically generated peptide
  VARIANT (1)...(20): Xaa = Any Amino Acid
PGTCGEXXICAYAXACTXGC

SEQ ID NO: 3382 - protein, 20 aa, Artificial Sequence
  Synthetically generated peptide
  VARIANT (1)...(20): Xaa = Any Amino Acid
PGTCGEXXICAYAXACTGXC

SEQ ID NO: 3383 - protein, 20 aa, Artificial Sequence
  Synthetically generated peptide
  VARIANT (1)...(20): Xaa = Any Amino Acid
PGTCGEXXICAYAXACTGCX

SEQ ID NO: 3384 - protein, 19 aa, Artificial Sequence
  Synthetically generated peptide
  VARIANT (1)...(19): Xaa = Any Amino Acid
PGTCGEXXICAYAAXCTGC

SEQ ID NO: 3385 - protein, 20 aa, Artificial Sequence
  Synthetically generated peptide
  VARIANT (1)...(20): Xaa = Any Amino Acid
PGTCGEXXICAYAAXXCTGC

SEQ ID NO: 3386 - protein, 20 aa, Artificial Sequence
  Synthetically generated peptide
  VARIANT (1)...(20): Xaa = Any Amino Acid
PGTCGEXXICAYAAXCXTGC

SEQ ID NO: 3387 - protein, 20 aa, Artificial Sequence
  Synthetically generated peptide
  VARIANT (1)...(20): Xaa = Any Amino Acid
PGTCGEXXICAYAAXCTXGC

SEQ ID NO: 3388 - protein, 20 aa, Artificial Sequence
  Synthetically generated peptide
  VARIANT (1)...(20): Xaa = Any Amino Acid
PGTCGEXXICAYAAXCTGXC

SEQ ID NO: 3389 - protein, 20 aa, Artificial Sequence
  Synthetically generated peptide
  VARIANT (1)...(20): Xaa = Any Amino Acid
PGTCGEXXICAYAAXCTGCX

SEQ ID NO: 3390 - protein, 19 aa, Artificial Sequence
  Synthetically generated peptide
  VARIANT (1)...(19): Xaa = Any Amino Acid
PGTCGEXXICAYAACXTGC

SEQ ID NO: 3391 - protein, 20 aa, Artificial Sequence
  Synthetically generated peptide
  VARIANT (1)...(20): Xaa = Any Amino Acid
PGTCGEXXICAYAACXXTGC

SEQ ID NO: 3392 - protein, 20 aa, Artificial Sequence
  Synthetically generated peptide
  VARIANT (1)...(20): Xaa = Any Amino Acid
PGTCGEXXICAYAACXTXGC

SEQ ID NO: 3393 - protein, 20 aa, Artificial Sequence
  Synthetically generated peptide
  VARIANT (1)...(20): Xaa = Any Amino Acid
PGTCGEXXICAYAACXTGXC

SEQ ID NO: 3394 - protein, 20 aa, Artificial Sequence
  Synthetically generated peptide
  VARIANT (1)...(20): Xaa = Any Amino Acid
PGTCGEXXICAYAACXTGCX

SEQ ID NO: 3395 - protein, 19 aa, Artificial Sequence
  Synthetically generated peptide
  VARIANT (1)...(19): Xaa = Any Amino Acid
PGTCGEXXICAYAACTXGC

SEQ ID NO: 3396 - protein, 20 aa, Artificial Sequence
  Synthetically generated peptide
  VARIANT (1)...(20): Xaa = Any Amino Acid
PGTCGEXXICAYAACTXXGC

SEQ ID NO: 3397 - protein, 20 aa, Artificial Sequence
  Synthetically generated peptide
  VARIANT (1)...(20): Xaa = Any Amino Acid
PGTCGEXXICAYAACTXGXC

SEQ ID NO: 3398 - protein, 20 aa, Artificial Sequence
  Synthetically generated peptide
  VARIANT (1)...(20): Xaa = Any Amino Acid
PGTCGEXXICAYAACTXGCX

SEQ ID NO: 3399 - protein, 19 aa, Artificial Sequence
  Synthetically generated peptide
  VARIANT (1)...(19): Xaa = Any Amino Acid
PGTCGEXXICAYAACTGXC

SEQ ID NO: 3400 - protein, 20 aa, Artificial Sequence
  Synthetically generated peptide
  VARIANT (1)...(20): Xaa = Any Amino Acid
PGTCGEXXICAYAACTGXXC

SEQ ID NO: 3401 - protein, 20 aa, Artificial Sequence
  Synthetically generated peptide
  VARIANT (1)...(20): Xaa = Any Amino Acid
PGTCGEXXICAYAACTGXCX

SEQ ID NO: 3402 - protein, 19 aa, Artificial Sequence
  Synthetically generated peptide
  VARIANT (1)...(19): Xaa = Any Amino Acid
PGTCGEXXICAYAACTGCX

SEQ ID NO: 3403 - protein, 20 aa, Artificial Sequence
  Synthetically generated peptide
  VARIANT (1)...(20): Xaa = Any Amino Acid
PGTCGEXXICAYAACTGCXX

SEQ ID NO: 3404 - protein, 18 aa, Artificial Sequence
  Synthetically generated peptide
  VARIANT (1)...(18): Xaa = Any Amino Acid
PGTCGEXIXCAYAACTGC

SEQ ID NO: 3405 - protein, 19 aa, Artificial Sequence
  Synthetically generated peptide
  VARIANT (1)...(19): Xaa = Any Amino Acid
PGTCGEXIXXCAYAACTGC

SEQ ID NO: 3406 - protein, 20 aa, Artificial Sequence
  Synthetically generated peptide
  VARIANT (1)...(20): Xaa = Any Amino Acid
PGTCGEXIXXXCAYAACTGC

SEQ ID NO: 3407 - protein, 20 aa, Artificial Sequence
  Synthetically generated peptide
  VARIANT (1)...(20): Xaa = Any Amino Acid
PGTCGEXIXXCXAYAACTGC

SEQ ID NO: 3408 - protein, 20 aa, Artificial Sequence
  Synthetically generated peptide
  VARIANT (1)...(20): Xaa = Any Amino Acid
PGTCGEXIXXCAXYAACTGC

SEQ ID NO: 3409 - protein, 20 aa, Artificial Sequence
  Synthetically generated peptide
  VARIANT (1)...(20): Xaa = Any Amino Acid
PGTCGEXIXXCAYXAACTGC

SEQ ID NO: 3410 - protein, 20 aa, Artificial Sequence
  Synthetically generated peptide
  VARIANT (1)...(20): Xaa = Any Amino Acid
PGTCGEXIXXCAYAXACTGC

SEQ ID NO: 3411 - protein, 20 aa, Artificial Sequence
  Synthetically generated peptide
  VARIANT (1)...(20): Xaa = Any Amino Acid
PGTCGEXIXXCAYAAXCTGC

SEQ ID NO: 3412 - protein, 20 aa, Artificial Sequence
  Synthetically generated peptide
  VARIANT (1)...(20): Xaa = Any Amino Acid
PGTCGEXIXXCAYAACXTGC

SEQ ID NO: 3413 - protein, 20 aa, Artificial Sequence
  Synthetically generated peptide
  VARIANT (1)...(20): Xaa = Any Amino Acid
PGTCGEXIXXCAYAACTXGC

SEQ ID NO: 3414 - protein, 20 aa, Artificial Sequence
  Synthetically generated peptide
  VARIANT (1)...(20): Xaa = Any Amino Acid
PGTCGEXIXXCAYAACTGXC

SEQ ID NO: 3415 - protein, 20 aa, Artificial Sequence
  Synthetically generated peptide
  VARIANT (1)...(20): Xaa = Any Amino Acid
PGTCGEXIXXCAYAACTGCX

SEQ ID NO: 3416 - protein, 19 aa, Artificial Sequence
  Synthetically generated peptide
  VARIANT (1)...(19): Xaa = Any Amino Acid
PGTCGEXIXCXAYAACTGC

SEQ ID NO: 3417 - protein, 20 aa, Artificial Sequence
  Synthetically generated peptide
  VARIANT (1)...(20): Xaa = Any Amino Acid
PGTCGEXIXCXXAYAACTGC

SEQ ID NO: 3418 - protein, 20 aa, Artificial Sequence
  Synthetically generated peptide
  VARIANT (1)...(20): Xaa = Any Amino Acid
PGTCGEXIXCXAXYAACTGC

SEQ ID NO: 3419 - protein, 20 aa, Artificial Sequence
  Synthetically generated peptide
  VARIANT (1)...(20): Xaa = Any Amino Acid
PGTCGEXIXCXAYXAACTGC

SEQ ID NO: 3420 - protein, 20 aa, Artificial Sequence
  Synthetically generated peptide
  VARIANT (1)...(20): Xaa = Any Amino Acid
PGTCGEXIXCXAYAXACTGC

SEQ ID NO: 3421 - protein, 20 aa, Artificial Sequence
  Synthetically generated peptide
  VARIANT (1)...(20): Xaa = Any Amino Acid
PGTCGEXIXCXAYAAXCTGC

SEQ ID NO: 3422 - protein, 20 aa, Artificial Sequence
  Synthetically generated peptide
  VARIANT (1)...(20): Xaa = Any Amino Acid
PGTCGEXIXCXAYAACXTGC

SEQ ID NO: 3423 - protein, 20 aa, Artificial Sequence
  Synthetically generated peptide
  VARIANT (1)...(20): Xaa = Any Amino Acid
PGTCGEXIXCXAYAACTXGC

SEQ ID NO: 3424 - protein, 20 aa, Artificial Sequence
  Synthetically generated peptide
  VARIANT (1)...(20): Xaa = Any Amino Acid
PGTCGEXIXCXAYAACTGXC

SEQ ID NO: 3425 - protein, 20 aa, Artificial Sequence
  Synthetically generated peptide
  VARIANT (1)...(20): Xaa = Any Amino Acid
PGTCGEXIXCXAYAACTGCX

SEQ ID NO: 3426 - protein, 19 aa, Artificial Sequence
  Synthetically generated peptide
  VARIANT (1)...(19): Xaa = Any Amino Acid
PGTCGEXIXCAXYAACTGC

SEQ ID NO: 3427 - protein, 20 aa, Artificial Sequence
  Synthetically generated peptide
  VARIANT (1)...(20): Xaa = Any Amino Acid
PGTCGEXIXCAXXYAACTGC

SEQ ID NO: 3428 - protein, 20 aa, Artificial Sequence
  Synthetically generated peptide
  VARIANT (1)...(20): Xaa = Any Amino Acid
PGTCGEXIXCAXYXAACTGC

SEQ ID NO: 3429 - protein, 20 aa, Artificial Sequence
  Synthetically generated peptide
  VARIANT (1)...(20): Xaa = Any Amino Acid
PGTCGEXIXCAXYAXACTGC

SEQ ID NO: 3430 - protein, 20 aa, Artificial Sequence
  Synthetically generated peptide
  VARIANT (1)...(20): Xaa = Any Amino Acid
PGTCGEXIXCAXYAAXCTGC

SEQ ID NO: 3431 - protein, 20 aa, Artificial Sequence
  Synthetically generated peptide
  VARIANT (1)...(20): Xaa = Any Amino Acid
PGTCGEXIXCAXYAACXTGC

SEQ ID NO: 3432 - protein, 20 aa, Artificial Sequence
  Synthetically generated peptide
  VARIANT (1)...(20): Xaa = Any Amino Acid
PGTCGEXIXCAXYAACTXGC

SEQ ID NO: 3433 - protein, 20 aa, Artificial Sequence
  Synthetically generated peptide
  VARIANT (1)...(20): Xaa = Any Amino Acid
PGTCGEXIXCAXYAACTGXC

SEQ ID NO: 3434 - protein, 20 aa, Artificial Sequence
  Synthetically generated peptide
  VARIANT (1)...(20): Xaa = Any Amino Acid
PGTCGEXIXCAXYAACTGCX

SEQ ID NO: 3435 - protein, 19 aa, Artificial Sequence
  Synthetically generated peptide
  VARIANT (1)...(19): Xaa = Any Amino Acid
PGTCGEXIXCAYXAACTGC

SEQ ID NO: 3436 - protein, 20 aa, Artificial Sequence
  Synthetically generated peptide
  VARIANT (1)...(20): Xaa = Any Amino Acid
PGTCGEXIXCAYXXAACTGC

SEQ ID NO: 3437 - protein, 20 aa, Artificial Sequence
  Synthetically generated peptide
  VARIANT (1)...(20): Xaa = Any Amino Acid
PGTCGEXIXCAYXAXACTGC

SEQ ID NO: 3438 - protein, 20 aa, Artificial Sequence
  Synthetically generated peptide
  VARIANT (1)...(20): Xaa = Any Amino Acid
PGTCGEXIXCAYXAAXCTGC

SEQ ID NO: 3439 - protein, 20 aa, Artificial Sequence
  Synthetically generated peptide
  VARIANT (1)...(20): Xaa = Any Amino Acid
PGTCGEXIXCAYXAACXTGC

SEQ ID NO: 3440 - protein, 20 aa, Artificial Sequence
  Synthetically generated peptide
  VARIANT (1)...(20): Xaa = Any Amino Acid
PGTCGEXIXCAYXAACTXGC

SEQ ID NO: 3441 - protein, 20 aa, Artificial Sequence
  Synthetically generated peptide
  VARIANT (1)...(20): Xaa = Any Amino Acid
PGTCGEXIXCAYXAACTGXC

SEQ ID NO: 3442 - protein, 20 aa, Artificial Sequence
  Synthetically generated peptide
  VARIANT (1)...(20): Xaa = Any Amino Acid
PGTCGEXIXCAYXAACTGCX

SEQ ID NO: 3443 - protein, 19 aa, Artificial Sequence
  Synthetically generated peptide
  VARIANT (1)...(19): Xaa = Any Amino Acid
PGTCGEXIXCAYAXACTGC

SEQ ID NO: 3444 - protein, 20 aa, Artificial Sequence
  Synthetically generated peptide
  VARIANT (1)...(20): Xaa = Any Amino Acid
PGTCGEXIXCAYAXXACTGC

SEQ ID NO: 3445 - protein, 20 aa, Artificial Sequence
  Synthetically generated peptide
  VARIANT (1)...(20): Xaa = Any Amino Acid
PGTCGEXIXCAYAXAXCTGC

SEQ ID NO: 3446 - protein, 20 aa, Artificial Sequence
  Synthetically generated peptide
  VARIANT (1)...(20): Xaa = Any Amino Acid
PGTCGEXIXCAYAXACXTGC

SEQ ID NO: 3447 - protein, 20 aa, Artificial Sequence
  Synthetically generated peptide
  VARIANT (1)...(20): Xaa = Any Amino Acid
PGTCGEXIXCAYAXACTXGC

SEQ ID NO: 3448 - protein, 20 aa, Artificial Sequence
  Synthetically generated peptide
  VARIANT (1)...(20): Xaa = Any Amino Acid
PGTCGEXIXCAYAXACTGXC

SEQ ID NO: 3449 - protein, 20 aa, Artificial Sequence
  Synthetically generated peptide
  VARIANT (1)...(20): Xaa = Any Amino Acid
PGTCGEXIXCAYAXACTGCX

SEQ ID NO: 3450 - protein, 19 aa, Artificial Sequence
  Synthetically generated peptide
  VARIANT (1)...(19): Xaa = Any Amino Acid
PGTCGEXIXCAYAAXCTGC

SEQ ID NO: 3451 - protein, 20 aa, Artificial Sequence
  Synthetically generated peptide
  VARIANT (1)...(20): Xaa = Any Amino Acid
PGTCGEXIXCAYAAXXCTGC

SEQ ID NO: 3452 - protein, 20 aa, Artificial Sequence
  Synthetically generated peptide
  VARIANT (1)...(20): Xaa = Any Amino Acid
PGTCGEXIXCAYAAXCXTGC

SEQ ID NO: 3453 - protein, 20 aa, Artificial Sequence
  Synthetically generated peptide
  VARIANT (1)...(20): Xaa = Any Amino Acid
PGTCGEXIXCAYAAXCTXGC

SEQ ID NO: 3454 - protein, 20 aa, Artificial Sequence
  Synthetically generated peptide
  VARIANT (1)...(20): Xaa = Any Amino Acid
PGTCGEXIXCAYAAXCTGXC

SEQ ID NO: 3455 - protein, 20 aa, Artificial Sequence
  Synthetically generated peptide
  VARIANT (1)...(20): Xaa = Any Amino Acid
PGTCGEXIXCAYAAXCTGCX

SEQ ID NO: 3456 - protein, 19 aa, Artificial Sequence
  Synthetically generated peptide
  VARIANT (1)...(19): Xaa = Any Amino Acid
PGTCGEXIXCAYAACXTGC

SEQ ID NO: 3457 - protein, 20 aa, Artificial Sequence
  Synthetically generated peptide
  VARIANT (1)...(20): Xaa = Any Amino Acid
PGTCGEXIXCAYAACXXTGC

SEQ ID NO: 3458 - protein, 20 aa, Artificial Sequence
  Synthetically generated peptide
  VARIANT (1)...(20): Xaa = Any Amino Acid
PGTCGEXIXCAYAACXTXGC

SEQ ID NO: 3459 - protein, 20 aa, Artificial Sequence
  Synthetically generated peptide
  VARIANT (1)...(20): Xaa = Any Amino Acid
PGTCGEXIXCAYAACXTGXC

SEQ ID NO: 3460 - protein, 20 aa, Artificial Sequence
  Synthetically generated peptide
  VARIANT (1)...(20): Xaa = Any Amino Acid
PGTCGEXIXCAYAACXTGCX

SEQ ID NO: 3461 - protein, 19 aa, Artificial Sequence
  Synthetically generated peptide
  VARIANT (1)...(19): Xaa = Any Amino Acid
PGTCGEXIXCAYAACTXGC

SEQ ID NO: 3462 - protein, 20 aa, Artificial Sequence
  Synthetically generated peptide
  VARIANT (1)...(20): Xaa = Any Amino Acid
PGTCGEXIXCAYAACTXXGC

SEQ ID NO: 3463 - protein, 20 aa, Artificial Sequence
  Synthetically generated peptide
  VARIANT (1)...(20): Xaa = Any Amino Acid
PGTCGEXIXCAYAACTXGXC

SEQ ID NO: 3464 - protein, 20 aa, Artificial Sequence
  Synthetically generated peptide
  VARIANT (1)...(20): Xaa = Any Amino Acid
PGTCGEXIXCAYAACTXGCX

SEQ ID NO: 3465 - protein, 19 aa, Artificial Sequence
  Synthetically generated peptide
  VARIANT (1)...(19): Xaa = Any Amino Acid
PGTCGEXIXCAYAACTGXC

SEQ ID NO: 3466 - protein, 20 aa, Artificial Sequence
  Synthetically generated peptide
  VARIANT (1)...(20): Xaa = Any Amino Acid
PGTCGEXIXCAYAACTGXXC

SEQ ID NO: 3467 - protein, 20 aa, Artificial Sequence
  Synthetically generated peptide
  VARIANT (1)...(20): Xaa = Any Amino Acid
PGTCGEXIXCAYAACTGXCX

SEQ ID NO: 3468 - protein, 19 aa, Artificial Sequence
  Synthetically generated peptide
  VARIANT (1)...(19): Xaa = Any Amino Acid
PGTCGEXIXCAYAACTGCX

SEQ ID NO: 3469 - protein, 20 aa, Artificial Sequence
  Synthetically generated peptide
  VARIANT (1)...(20): Xaa = Any Amino Acid
PGTCGEXIXCAYAACTGCXX

SEQ ID NO: 3470 - protein, 18 aa, Artificial Sequence
  Synthetically generated peptide
  VARIANT (1)...(18): Xaa = Any Amino Acid
PGTCGEXICXAYAACTGC

SEQ ID NO: 3471 - protein, 19 aa, Artificial Sequence
  Synthetically generated peptide
  VARIANT (1)...(19): Xaa = Any Amino Acid
PGTCGEXICXXAYAACTGC

SEQ ID NO: 3472 - protein, 20 aa, Artificial Sequence
  Synthetically generated peptide
  VARIANT (1)...(20): Xaa = Any Amino Acid
PGTCGEXICXXXAYAACTGC

SEQ ID NO: 3473 - protein, 20 aa, Artificial Sequence
  Synthetically generated peptide
  VARIANT (1)...(20): Xaa = Any Amino Acid
PGTCGEXICXXAXYAACTGC

SEQ ID NO: 3474 - protein, 20 aa, Artificial Sequence
  Synthetically generated peptide
  VARIANT (1)...(20): Xaa = Any Amino Acid
PGTCGEXICXXAYXAACTGC

SEQ ID NO: 3475 - protein, 20 aa, Artificial Sequence
  Synthetically generated peptide
  VARIANT (1)...(20): Xaa = Any Amino Acid
PGTCGEXICXXAYAXACTGC

SEQ ID NO: 3476 - protein, 20 aa, Artificial Sequence
  Synthetically generated peptide
  VARIANT (1)...(20): Xaa = Any Amino Acid
PGTCGEXICXXAYAAXCTGC

SEQ ID NO: 3477 - protein, 20 aa, Artificial Sequence
  Synthetically generated peptide
  VARIANT (1)...(20): Xaa = Any Amino Acid
PGTCGEXICXXAYAACXTGC

SEQ ID NO: 3478 - protein, 20 aa, Artificial Sequence
  Synthetically generated peptide
  VARIANT (1)...(20): Xaa = Any Amino Acid
PGTCGEXICXXAYAACTXGC

SEQ ID NO: 3479 - protein, 20 aa, Artificial Sequence
  Synthetically generated peptide
  VARIANT (1)...(20): Xaa = Any Amino Acid
PGTCGEXICXXAYAACTGXC

SEQ ID NO: 3480 - protein, 20 aa, Artificial Sequence
  Synthetically generated peptide
  VARIANT (1)...(20): Xaa = Any Amino Acid
PGTCGEXICXXAYAACTGCX

SEQ ID NO: 3481 - protein, 19 aa, Artificial Sequence
  Synthetically generated peptide
  VARIANT (1)...(19): Xaa = Any Amino Acid
PGTCGEXICXAXYAACTGC

SEQ ID NO: 3482 - protein, 20 aa, Artificial Sequence
  Synthetically generated peptide
  VARIANT (1)...(20): Xaa = Any Amino Acid
PGTCGEXICXAXXYAACTGC

SEQ ID NO: 3483 - protein, 20 aa, Artificial Sequence
  Synthetically generated peptide
  VARIANT (1)...(20): Xaa = Any Amino Acid
PGTCGEXICXAXYXAACTGC

SEQ ID NO: 3484 - protein, 20 aa, Artificial Sequence
  Synthetically generated peptide
  VARIANT (1)...(20): Xaa = Any Amino Acid
PGTCGEXICXAXYAXACTGC

SEQ ID NO: 3485 - protein, 20 aa, Artificial Sequence
  Synthetically generated peptide
  VARIANT (1)...(20): Xaa = Any Amino Acid
PGTCGEXICXAXYAAXCTGC

SEQ ID NO: 3486 - protein, 20 aa, Artificial Sequence
  Synthetically generated peptide
  VARIANT (1)...(20): Xaa = Any Amino Acid
PGTCGEXICXAXYAACXTGC

SEQ ID NO: 3487 - protein, 20 aa, Artificial Sequence
  Synthetically generated peptide
  VARIANT (1)...(20): Xaa = Any Amino Acid
PGTCGEXICXAXYAACTXGC

SEQ ID NO: 3488 - protein, 20 aa, Artificial Sequence
  Synthetically generated peptide
  VARIANT (1)...(20): Xaa = Any Amino Acid
PGTCGEXICXAXYAACTGXC

SEQ ID NO: 3489 - protein, 20 aa, Artificial Sequence
  Synthetically generated peptide
  VARIANT (1)...(20): Xaa = Any Amino Acid
PGTCGEXICXAXYAACTGCX

SEQ ID NO: 3490 - protein, 19 aa, Artificial Sequence
  Synthetically generated peptide
  VARIANT (1)...(19): Xaa = Any Amino Acid
PGTCGEXICXAYXAACTGC

SEQ ID NO: 3491 - protein, 20 aa, Artificial Sequence
  Synthetically generated peptide
  VARIANT (1)...(20): Xaa = Any Amino Acid
PGTCGEXICXAYXXAACTGC

SEQ ID NO: 3492 - protein, 20 aa, Artificial Sequence
  Synthetically generated peptide
  VARIANT (1)...(20): Xaa = Any Amino Acid
PGTCGEXICXAYXAXACTGC

SEQ ID NO: 3493 - protein, 20 aa, Artificial Sequence
  Synthetically generated peptide
  VARIANT (1)...(20): Xaa = Any Amino Acid
PGTCGEXICXAYXAAXCTGC

SEQ ID NO: 3494 - protein, 20 aa, Artificial Sequence
  Synthetically generated peptide
  VARIANT (1)...(20): Xaa = Any Amino Acid
PGTCGEXICXAYXAACXTGC

SEQ ID NO: 3495 - protein, 20 aa, Artificial Sequence
  Synthetically generated peptide
  VARIANT (1)...(20): Xaa = Any Amino Acid
PGTCGEXICXAYXAACTXGC

SEQ ID NO: 3496 - protein, 20 aa, Artificial Sequence
  Synthetically generated peptide
  VARIANT (1)...(20): Xaa = Any Amino Acid
PGTCGEXICXAYXAACTGXC

SEQ ID NO: 3497 - protein, 20 aa, Artificial Sequence
  Synthetically generated peptide
  VARIANT (1)...(20): Xaa = Any Amino Acid
PGTCGEXICXAYXAACTGCX

SEQ ID NO: 3498 - protein, 19 aa, Artificial Sequence
  Synthetically generated peptide
  VARIANT (1)...(19): Xaa = Any Amino Acid
PGTCGEXICXAYAXACTGC

SEQ ID NO: 3499 - protein, 20 aa, Artificial Sequence
  Synthetically generated peptide
  VARIANT (1)...(20): Xaa = Any Amino Acid
PGTCGEXICXAYAXXACTGC

SEQ ID NO: 3500 - protein, 20 aa, Artificial Sequence
  Synthetically generated peptide
  VARIANT (1)...(20): Xaa = Any Amino Acid
PGTCGEXICXAYAXAXCTGC

SEQ ID NO: 3501 - protein, 20 aa, Artificial Sequence
  Synthetically generated peptide
  VARIANT (1)...(20): Xaa = Any Amino Acid
PGTCGEXICXAYAXACXTGC

SEQ ID NO: 3502 - protein, 20 aa, Artificial Sequence
  Synthetically generated peptide
  VARIANT (1)...(20): Xaa = Any Amino Acid
PGTCGEXICXAYAXACTXGC

SEQ ID NO: 3503 - protein, 20 aa, Artificial Sequence
  Synthetically generated peptide
  VARIANT (1)...(20): Xaa = Any Amino Acid
PGTCGEXICXAYAXACTGXC

SEQ ID NO: 3504 - protein, 20 aa, Artificial Sequence
  Synthetically generated peptide
  VARIANT (1)...(20): Xaa = Any Amino Acid
PGTCGEXICXAYAXACTGCX

SEQ ID NO: 3505 - protein, 19 aa, Artificial Sequence
  Synthetically generated peptide
  VARIANT (1)...(19): Xaa = Any Amino Acid
PGTCGEXICXAYAAXCTGC

SEQ ID NO: 3506 - protein, 20 aa, Artificial Sequence
  Synthetically generated peptide
  VARIANT (1)...(20): Xaa = Any Amino Acid
PGTCGEXICXAYAAXXCTGC

SEQ ID NO: 3507 - protein, 20 aa, Artificial Sequence
  Synthetically generated peptide
  VARIANT (1)...(20): Xaa = Any Amino Acid
PGTCGEXICXAYAAXCXTGC

SEQ ID NO: 3508 - protein, 20 aa, Artificial Sequence
  Synthetically generated peptide
  VARIANT (1)...(20): Xaa = Any Amino Acid
PGTCGEXICXAYAAXCTXGC

SEQ ID NO: 3509 - protein, 20 aa, Artificial Sequence
  Synthetically generated peptide
  VARIANT (1)...(20): Xaa = Any Amino Acid
PGTCGEXICXAYAAXCTGXC

SEQ ID NO: 3510 - protein, 20 aa, Artificial Sequence
  Synthetically generated peptide
  VARIANT (1)...(20): Xaa = Any Amino Acid
PGTCGEXICXAYAAXCTGCX

SEQ ID NO: 3511 - protein, 19 aa, Artificial Sequence
  Synthetically generated peptide
  VARIANT (1)...(19): Xaa = Any Amino Acid
PGTCGEXICXAYAACXTGC

SEQ ID NO: 3512 - protein, 20 aa, Artificial Sequence
  Synthetically generated peptide
  VARIANT (1)...(20): Xaa = Any Amino Acid
PGTCGEXICXAYAACXXTGC

SEQ ID NO: 3513 - protein, 20 aa, Artificial Sequence
  Synthetically generated peptide
  VARIANT (1)...(20): Xaa = Any Amino Acid
PGTCGEXICXAYAACXTXGC

SEQ ID NO: 3514 - protein, 20 aa, Artificial Sequence
  Synthetically generated peptide
  VARIANT (1)...(20): Xaa = Any Amino Acid
PGTCGEXICXAYAACXTGXC

SEQ ID NO: 3515 - protein, 20 aa, Artificial Sequence
  Synthetically generated peptide
  VARIANT (1)...(20): Xaa = Any Amino Acid
PGTCGEXICXAYAACXTGCX

SEQ ID NO: 3516 - protein, 19 aa, Artificial Sequence
  Synthetically generated peptide
  VARIANT (1)...(19): Xaa = Any Amino Acid
PGTCGEXICXAYAACTXGC

SEQ ID NO: 3517 - protein, 20 aa, Artificial Sequence
  Synthetically generated peptide
  VARIANT (1)...(20): Xaa = Any Amino Acid
PGTCGEXICXAYAACTXXGC

SEQ ID NO: 3518 - protein, 20 aa, Artificial Sequence
  Synthetically generated peptide
  VARIANT (1)...(20): Xaa = Any Amino Acid
PGTCGEXICXAYAACTXGXC

SEQ ID NO: 3519 - protein, 20 aa, Artificial Sequence
  Synthetically generated peptide
  VARIANT (1)...(20): Xaa = Any Amino Acid
PGTCGEXICXAYAACTXGCX

SEQ ID NO: 3520 - protein, 19 aa, Artificial Sequence
  Synthetically generated peptide
  VARIANT (1)...(19): Xaa = Any Amino Acid
PGTCGEXICXAYAACTGXC

SEQ ID NO: 3521 - protein, 20 aa, Artificial Sequence
  Synthetically generated peptide
  VARIANT (1)...(20): Xaa = Any Amino Acid
PGTCGEXICXAYAACTGXXC

SEQ ID NO: 3522 - protein, 20 aa, Artificial Sequence
  Synthetically generated peptide
  VARIANT (1)...(20): Xaa = Any Amino Acid
PGTCGEXICXAYAACTGXCX

SEQ ID NO: 3523 - protein, 19 aa, Artificial Sequence
  Synthetically generated peptide
  VARIANT (1)...(19): Xaa = Any Amino Acid
PGTCGEXICXAYAACTGCX

SEQ ID NO: 3524 - protein, 20 aa, Artificial Sequence
  Synthetically generated peptide
  VARIANT (1)...(20): Xaa = Any Amino Acid
PGTCGEXICXAYAACTGCXX

SEQ ID NO: 3525 - protein, 18 aa, Artificial Sequence
  Synthetically generated peptide
  VARIANT (1)...(18): Xaa = Any Amino Acid
PGTCGEXICAXYAACTGC

SEQ ID NO: 3526 - protein, 19 aa, Artificial Sequence
  Synthetically generated peptide
  VARIANT (1)...(19): Xaa = Any Amino Acid
PGTCGEXICAXXYAACTGC

SEQ ID NO: 3527 - protein, 20 aa, Artificial Sequence
  Synthetically generated peptide
  VARIANT (1)...(20): Xaa = Any Amino Acid
PGTCGEXICAXXXYAACTGC

SEQ ID NO: 3528 - protein, 20 aa, Artificial Sequence
  Synthetically generated peptide
  VARIANT (1)...(20): Xaa = Any Amino Acid
PGTCGEXICAXXYXAACTGC

SEQ ID NO: 3529 - protein, 20 aa, Artificial Sequence
  Synthetically generated peptide
  VARIANT (1)...(20): Xaa = Any Amino Acid
PGTCGEXICAXXYAXACTGC

SEQ ID NO: 3530 - protein, 20 aa, Artificial Sequence
  Synthetically generated peptide
  VARIANT (1)...(20): Xaa = Any Amino Acid
PGTCGEXICAXXYAAXCTGC

SEQ ID NO: 3531 - protein, 20 aa, Artificial Sequence
  Synthetically generated peptide
  VARIANT (1)...(20): Xaa = Any Amino Acid
PGTCGEXICAXXYAACXTGC

SEQ ID NO: 3532 - protein, 20 aa, Artificial Sequence
  Synthetically generated peptide
  VARIANT (1)...(20): Xaa = Any Amino Acid
PGTCGEXICAXXYAACTXGC

SEQ ID NO: 3533 - protein, 20 aa, Artificial Sequence
  Synthetically generated peptide
  VARIANT (1)...(20): Xaa = Any Amino Acid
PGTCGEXICAXXYAACTGXC

SEQ ID NO: 3534 - protein, 20 aa, Artificial Sequence
  Synthetically generated peptide
  VARIANT (1)...(20): Xaa = Any Amino Acid
PGTCGEXICAXXYAACTGCX

SEQ ID NO: 3535 - protein, 19 aa, Artificial Sequence
  Synthetically generated peptide
  VARIANT (1)...(19): Xaa = Any Amino Acid
PGTCGEXICAXYXAACTGC

SEQ ID NO: 3536 - protein, 20 aa, Artificial Sequence
  Synthetically generated peptide
  VARIANT (1)...(20): Xaa = Any Amino Acid
PGTCGEXICAXYXXAACTGC

SEQ ID NO: 3537 - protein, 20 aa, Artificial Sequence
  Synthetically generated peptide
  VARIANT (1)...(20): Xaa = Any Amino Acid
PGTCGEXICAXYXAXACTGC

SEQ ID NO: 3538 - protein, 20 aa, Artificial Sequence
  Synthetically generated peptide
  VARIANT (1)...(20): Xaa = Any Amino Acid
PGTCGEXICAXYXAAXCTGC

SEQ ID NO: 3539 - protein, 20 aa, Artificial Sequence
  Synthetically generated peptide
  VARIANT (1)...(20): Xaa = Any Amino Acid
PGTCGEXICAXYXAACXTGC

SEQ ID NO: 3540 - protein, 20 aa, Artificial Sequence
  Synthetically generated peptide
  VARIANT (1)...(20): Xaa = Any Amino Acid
PGTCGEXICAXYXAACTXGC

SEQ ID NO: 3541 - protein, 20 aa, Artificial Sequence
  Synthetically generated peptide
  VARIANT (1)...(20): Xaa = Any Amino Acid
PGTCGEXICAXYXAACTGXC

SEQ ID NO: 3542 - protein, 20 aa, Artificial Sequence
  Synthetically generated peptide
  VARIANT (1)...(20): Xaa = Any Amino Acid
PGTCGEXICAXYXAACTGCX

SEQ ID NO: 3543 - protein, 19 aa, Artificial Sequence
  Synthetically generated peptide
  VARIANT (1)...(19): Xaa = Any Amino Acid
PGTCGEXICAXYAXACTGC

SEQ ID NO: 3544 - protein, 20 aa, Artificial Sequence
  Synthetically generated peptide
  VARIANT (1)...(20): Xaa = Any Amino Acid
PGTCGEXICAXYAXXACTGC

SEQ ID NO: 3545 - protein, 20 aa, Artificial Sequence
  Synthetically generated peptide
  VARIANT (1)...(20): Xaa = Any Amino Acid
PGTCGEXICAXYAXAXCTGC

SEQ ID NO: 3546 - protein, 20 aa, Artificial Sequence
  Synthetically generated peptide
  VARIANT (1)...(20): Xaa = Any Amino Acid
PGTCGEXICAXYAXACXTGC

SEQ ID NO: 3547 - protein, 20 aa, Artificial Sequence
  Synthetically generated peptide
  VARIANT (1)...(20): Xaa = Any Amino Acid
PGTCGEXICAXYAXACTXGC

SEQ ID NO: 3548 - protein, 20 aa, Artificial Sequence
  Synthetically generated peptide
  VARIANT (1)...(20): Xaa = Any Amino Acid
PGTCGEXICAXYAXACTGXC

SEQ ID NO: 3549 - protein, 20 aa, Artificial Sequence
  Synthetically generated peptide
  VARIANT (1)...(20): Xaa = Any Amino Acid
PGTCGEXICAXYAXACTGCX

SEQ ID NO: 3550 - protein, 19 aa, Artificial Sequence
  Synthetically generated peptide
  VARIANT (1)...(19): Xaa = Any Amino Acid
PGTCGEXICAXYAAXCTGC

SEQ ID NO: 3551 - protein, 20 aa, Artificial Sequence
  Synthetically generated peptide
  VARIANT (1)...(20): Xaa = Any Amino Acid
PGTCGEXICAXYAAXXCTGC

SEQ ID NO: 3552 - protein, 20 aa, Artificial Sequence
  Synthetically generated peptide
  VARIANT (1)...(20): Xaa = Any Amino Acid
PGTCGEXICAXYAAXCXTGC

SEQ ID NO: 3553 - protein, 20 aa, Artificial Sequence
  Synthetically generated peptide
  VARIANT (1)...(20): Xaa = Any Amino Acid
PGTCGEXICAXYAAXCTXGC

SEQ ID NO: 3554 - protein, 20 aa, Artificial Sequence
  Synthetically generated peptide
  VARIANT (1)...(20): Xaa = Any Amino Acid
PGTCGEXICAXYAAXCTGXC

SEQ ID NO: 3555 - protein, 20 aa, Artificial Sequence
  Synthetically generated peptide
  VARIANT (1)...(20): Xaa = Any Amino Acid
PGTCGEXICAXYAAXCTGCX

SEQ ID NO: 3556 - protein, 19 aa, Artificial Sequence
  Synthetically generated peptide
  VARIANT (1)...(19): Xaa = Any Amino Acid
PGTCGEXICAXYAACXTGC

SEQ ID NO: 3557 - protein, 20 aa, Artificial Sequence
  Synthetically generated peptide
  VARIANT (1)...(20): Xaa = Any Amino Acid
PGTCGEXICAXYAACXXTGC

SEQ ID NO: 3558 - protein, 20 aa, Artificial Sequence
  Synthetically generated peptide
  VARIANT (1)...(20): Xaa = Any Amino Acid
PGTCGEXICAXYAACXTXGC

SEQ ID NO: 3559 - protein, 20 aa, Artificial Sequence
  Synthetically generated peptide
  VARIANT (1)...(20): Xaa = Any Amino Acid
PGTCGEXICAXYAACXTGXC

SEQ ID NO: 3560 - protein, 20 aa, Artificial Sequence
  Synthetically generated peptide
  VARIANT (1)...(20): Xaa = Any Amino Acid
PGTCGEXICAXYAACXTGCX

SEQ ID NO: 3561 - protein, 19 aa, Artificial Sequence
  Synthetically generated peptide
  VARIANT (1)...(19): Xaa = Any Amino Acid
PGTCGEXICAXYAACTXGC

SEQ ID NO: 3562 - protein, 20 aa, Artificial Sequence
  Synthetically generated peptide
  VARIANT (1)...(20): Xaa = Any Amino Acid
PGTCGEXICAXYAACTXXGC

SEQ ID NO: 3563 - protein, 20 aa, Artificial Sequence
  Synthetically generated peptide
  VARIANT (1)...(20): Xaa = Any Amino Acid
PGTCGEXICAXYAACTXGXC

SEQ ID NO: 3564 - protein, 20 aa, Artificial Sequence
  Synthetically generated peptide
  VARIANT (1)...(20): Xaa = Any Amino Acid
PGTCGEXICAXYAACTXGCX

SEQ ID NO: 3565 - protein, 19 aa, Artificial Sequence
  Synthetically generated peptide
  VARIANT (1)...(19): Xaa = Any Amino Acid
PGTCGEXICAXYAACTGXC

SEQ ID NO: 3566 - protein, 20 aa, Artificial Sequence
  Synthetically generated peptide
  VARIANT (1)...(20): Xaa = Any Amino Acid
PGTCGEXICAXYAACTGXXC

SEQ ID NO: 3567 - protein, 20 aa, Artificial Sequence
  Synthetically generated peptide
  VARIANT (1)...(20): Xaa = Any Amino Acid
PGTCGEXICAXYAACTGXCX

SEQ ID NO: 3568 - protein, 19 aa, Artificial Sequence
  Synthetically generated peptide
  VARIANT (1)...(19): Xaa = Any Amino Acid
PGTCGEXICAXYAACTGCX

SEQ ID NO: 3569 - protein, 20 aa, Artificial Sequence
  Synthetically generated peptide
  VARIANT (1)...(20): Xaa = Any Amino Acid
PGTCGEXICAXYAACTGCXX

SEQ ID NO: 3570 - protein, 18 aa, Artificial Sequence
  Synthetically generated peptide
  VARIANT (1)...(18): Xaa = Any Amino Acid
PGTCGEXICAYXAACTGC

SEQ ID NO: 3571 - protein, 19 aa, Artificial Sequence
  Synthetically generated peptide
  VARIANT (1)...(19): Xaa = Any Amino Acid
PGTCGEXICAYXXAACTGC

SEQ ID NO: 3572 - protein, 20 aa, Artificial Sequence
  Synthetically generated peptide
  VARIANT (1)...(20): Xaa = Any Amino Acid
PGTCGEXICAYXXXAACTGC

SEQ ID NO: 3573 - protein, 20 aa, Artificial Sequence
  Synthetically generated peptide
  VARIANT (1)...(20): Xaa = Any Amino Acid
PGTCGEXICAYXXAXACTGC

SEQ ID NO: 3574 - protein, 20 aa, Artificial Sequence
  Synthetically generated peptide
  VARIANT (1)...(20): Xaa = Any Amino Acid
PGTCGEXICAYXXAAXCTGC

SEQ ID NO: 3575 - protein, 20 aa, Artificial Sequence
  Synthetically generated peptide
  VARIANT (1)...(20): Xaa = Any Amino Acid
PGTCGEXICAYXXAACXTGC

SEQ ID NO: 3576 - protein, 20 aa, Artificial Sequence
  Synthetically generated peptide
  VARIANT (1)...(20): Xaa = Any Amino Acid
PGTCGEXICAYXXAACTXGC

SEQ ID NO: 3577 - protein, 20 aa, Artificial Sequence
  Synthetically generated peptide
  VARIANT (1)...(20): Xaa = Any Amino Acid
PGTCGEXICAYXXAACTGXC

SEQ ID NO: 3578 - protein, 20 aa, Artificial Sequence
  Synthetically generated peptide
  VARIANT (1)...(20): Xaa = Any Amino Acid
PGTCGEXICAYXXAACTGCX

SEQ ID NO: 3579 - protein, 19 aa, Artificial Sequence
  Synthetically generated peptide
  VARIANT (1)...(19): Xaa = Any Amino Acid
PGTCGEXICAYXAXACTGC

SEQ ID NO: 3580 - protein, 20 aa, Artificial Sequence
  Synthetically generated peptide
  VARIANT (1)...(20): Xaa = Any Amino Acid
PGTCGEXICAYXAXXACTGC

SEQ ID NO: 3581 - protein, 20 aa, Artificial Sequence
  Synthetically generated peptide
  VARIANT (1)...(20): Xaa = Any Amino Acid
PGTCGEXICAYXAXAXCTGC

SEQ ID NO: 3582 - protein, 20 aa, Artificial Sequence
  Synthetically generated peptide
  VARIANT (1)...(20): Xaa = Any Amino Acid
PGTCGEXICAYXAXACXTGC

SEQ ID NO: 3583 - protein, 20 aa, Artificial Sequence
  Synthetically generated peptide
  VARIANT (1)...(20): Xaa = Any Amino Acid
PGTCGEXICAYXAXACTXGC

SEQ ID NO: 3584 - protein, 20 aa, Artificial Sequence
  Synthetically generated peptide
  VARIANT (1)...(20): Xaa = Any Amino Acid
PGTCGEXICAYXAXACTGXC

SEQ ID NO: 3585 - protein, 20 aa, Artificial Sequence
  Synthetically generated peptide
  VARIANT (1)...(20): Xaa = Any Amino Acid
PGTCGEXICAYXAXACTGCX

SEQ ID NO: 3586 - protein, 19 aa, Artificial Sequence
  Synthetically generated peptide
  VARIANT (1)...(19): Xaa = Any Amino Acid
PGTCGEXICAYXAAXCTGC

SEQ ID NO: 3587 - protein, 20 aa, Artificial Sequence
  Synthetically generated peptide
  VARIANT (1)...(20): Xaa = Any Amino Acid
PGTCGEXICAYXAAXXCTGC

SEQ ID NO: 3588 - protein, 20 aa, Artificial Sequence
  Synthetically generated peptide
  VARIANT (1)...(20): Xaa = Any Amino Acid
PGTCGEXICAYXAAXCXTGC

SEQ ID NO: 3589 - protein, 20 aa, Artificial Sequence
  Synthetically generated peptide
  VARIANT (1)...(20): Xaa = Any Amino Acid
PGTCGEXICAYXAAXCTXGC

SEQ ID NO: 3590 - protein, 20 aa, Artificial Sequence
  Synthetically generated peptide
  VARIANT (1)...(20): Xaa = Any Amino Acid
PGTCGEXICAYXAAXCTGXC

SEQ ID NO: 3591 - protein, 20 aa, Artificial Sequence
  Synthetically generated peptide
  VARIANT (1)...(20): Xaa = Any Amino Acid
PGTCGEXICAYXAAXCTGCX

SEQ ID NO: 3592 - protein, 19 aa, Artificial Sequence
  Synthetically generated peptide
  VARIANT (1)...(19): Xaa = Any Amino Acid
PGTCGEXICAYXAACXTGC

SEQ ID NO: 3593 - protein, 20 aa, Artificial Sequence
  Synthetically generated peptide
  VARIANT (1)...(20): Xaa = Any Amino Acid
PGTCGEXICAYXAACXXTGC

SEQ ID NO: 3594 - protein, 20 aa, Artificial Sequence
  Synthetically generated peptide
  VARIANT (1)...(20): Xaa = Any Amino Acid
PGTCGEXICAYXAACXTXGC

SEQ ID NO: 3595 - protein, 20 aa, Artificial Sequence
  Synthetically generated peptide
  VARIANT (1)...(20): Xaa = Any Amino Acid
PGTCGEXICAYXAACXTGXC

SEQ ID NO: 3596 - protein, 20 aa, Artificial Sequence
  Synthetically generated peptide
  VARIANT (1)...(20): Xaa = Any Amino Acid
PGTCGEXICAYXAACXTGCX

SEQ ID NO: 3597 - protein, 19 aa, Artificial Sequence
  Synthetically generated peptide
  VARIANT (1)...(19): Xaa = Any Amino Acid
PGTCGEXICAYXAACTXGC

SEQ ID NO: 3598 - protein, 20 aa, Artificial Sequence
  Synthetically generated peptide
  VARIANT (1)...(20): Xaa = Any Amino Acid
PGTCGEXICAYXAACTXXGC

SEQ ID NO: 3599 - protein, 20 aa, Artificial Sequence
  Synthetically generated peptide
  VARIANT (1)...(20): Xaa = Any Amino Acid
PGTCGEXICAYXAACTXGXC

SEQ ID NO: 3600 - protein, 20 aa, Artificial Sequence
  Synthetically generated peptide
  VARIANT (1)...(20): Xaa = Any Amino Acid
PGTCGEXICAYXAACTXGCX

SEQ ID NO: 3601 - protein, 19 aa, Artificial Sequence
  Synthetically generated peptide
  VARIANT (1)...(19): Xaa = Any Amino Acid
PGTCGEXICAYXAACTGXC

SEQ ID NO: 3602 - protein, 20 aa, Artificial Sequence
  Synthetically generated peptide
  VARIANT (1)...(20): Xaa = Any Amino Acid
PGTCGEXICAYXAACTGXXC

SEQ ID NO: 3603 - protein, 20 aa, Artificial Sequence
  Synthetically generated peptide
  VARIANT (1)...(20): Xaa = Any Amino Acid
PGTCGEXICAYXAACTGXCX

SEQ ID NO: 3604 - protein, 19 aa, Artificial Sequence
  Synthetically generated peptide
  VARIANT (1)...(19): Xaa = Any Amino Acid
PGTCGEXICAYXAACTGCX

SEQ ID NO: 3605 - protein, 20 aa, Artificial Sequence
  Synthetically generated peptide
  VARIANT (1)...(20): Xaa = Any Amino Acid
PGTCGEXICAYXAACTGCXX

SEQ ID NO: 3606 - protein, 18 aa, Artificial Sequence
  Synthetically generated peptide
  VARIANT (1)...(18): Xaa = Any Amino Acid
PGTCGEXICAYAXACTGC

SEQ ID NO: 3607 - protein, 19 aa, Artificial Sequence
  Synthetically generated peptide
  VARIANT (1)...(19): Xaa = Any Amino Acid
PGTCGEXICAYAXXACTGC

SEQ ID NO: 3608 - protein, 20 aa, Artificial Sequence
  Synthetically generated peptide
  VARIANT (1)...(20): Xaa = Any Amino Acid
PGTCGEXICAYAXXXACTGC

SEQ ID NO: 3609 - protein, 20 aa, Artificial Sequence
  Synthetically generated peptide
  VARIANT (1)...(20): Xaa = Any Amino Acid
PGTCGEXICAYAXXAXCTGC

SEQ ID NO: 3610 - protein, 20 aa, Artificial Sequence
  Synthetically generated peptide
  VARIANT (1)...(20): Xaa = Any Amino Acid
PGTCGEXICAYAXXACXTGC

SEQ ID NO: 3611 - protein, 20 aa, Artificial Sequence
  Synthetically generated peptide
  VARIANT (1)...(20): Xaa = Any Amino Acid
PGTCGEXICAYAXXACTXGC

SEQ ID NO: 3612 - protein, 20 aa, Artificial Sequence
  Synthetically generated peptide
  VARIANT (1)...(20): Xaa = Any Amino Acid
PGTCGEXICAYAXXACTGXC

SEQ ID NO: 3613 - protein, 20 aa, Artificial Sequence
  Synthetically generated peptide
  VARIANT (1)...(20): Xaa = Any Amino Acid
PGTCGEXICAYAXXACTGCX

SEQ ID NO: 3614 - protein, 19 aa, Artificial Sequence
  Synthetically generated peptide
  VARIANT (1)...(19): Xaa = Any Amino Acid
PGTCGEXICAYAXAXCTGC

SEQ ID NO: 3615 - protein, 20 aa, Artificial Sequence
  Synthetically generated peptide
  VARIANT (1)...(20): Xaa = Any Amino Acid
PGTCGEXICAYAXAXXCTGC

SEQ ID NO: 3616 - protein, 20 aa, Artificial Sequence
  Synthetically generated peptide
  VARIANT (1)...(20): Xaa = Any Amino Acid
PGTCGEXICAYAXAXCXTGC

SEQ ID NO: 3617 - protein, 20 aa, Artificial Sequence
  Synthetically generated peptide
  VARIANT (1)...(20): Xaa = Any Amino Acid
PGTCGEXICAYAXAXCTXGC

SEQ ID NO: 3618 - protein, 20 aa, Artificial Sequence
  Synthetically generated peptide
  VARIANT (1)...(20): Xaa = Any Amino Acid
PGTCGEXICAYAXAXCTGXC

SEQ ID NO: 3619 - protein, 20 aa, Artificial Sequence
  Synthetically generated peptide
  VARIANT (1)...(20): Xaa = Any Amino Acid
PGTCGEXICAYAXAXCTGCX

SEQ ID NO: 3620 - protein, 19 aa, Artificial Sequence
  Synthetically generated peptide
  VARIANT (1)...(19): Xaa = Any Amino Acid
PGTCGEXICAYAXACXTGC

SEQ ID NO: 3621 - protein, 20 aa, Artificial Sequence
  Synthetically generated peptide
  VARIANT (1)...(20): Xaa = Any Amino Acid
PGTCGEXICAYAXACXXTGC

SEQ ID NO: 3622 - protein, 20 aa, Artificial Sequence
  Synthetically generated peptide
  VARIANT (1)...(20): Xaa = Any Amino Acid
PGTCGEXICAYAXACXTXGC

SEQ ID NO: 3623 - protein, 20 aa, Artificial Sequence
  Synthetically generated peptide
  VARIANT (1)...(20): Xaa = Any Amino Acid
PGTCGEXICAYAXACXTGXC

SEQ ID NO: 3624 - protein, 20 aa, Artificial Sequence
  Synthetically generated peptide
  VARIANT (1)...(20): Xaa = Any Amino Acid
PGTCGEXICAYAXACXTGCX

SEQ ID NO: 3625 - protein, 19 aa, Artificial Sequence
  Synthetically generated peptide
  VARIANT (1)...(19): Xaa = Any Amino Acid
PGTCGEXICAYAXACTXGC

SEQ ID NO: 3626 - protein, 20 aa, Artificial Sequence
  Synthetically generated peptide
  VARIANT (1)...(20): Xaa = Any Amino Acid
PGTCGEXICAYAXACTXXGC

SEQ ID NO: 3627 - protein, 20 aa, Artificial Sequence
  Synthetically generated peptide
  VARIANT (1)...(20): Xaa = Any Amino Acid
PGTCGEXICAYAXACTXGXC

SEQ ID NO: 3628 - protein, 20 aa, Artificial Sequence
  Synthetically generated peptide
  VARIANT (1)...(20): Xaa = Any Amino Acid
PGTCGEXICAYAXACTXGCX

SEQ ID NO: 3629 - protein, 19 aa, Artificial Sequence
  Synthetically generated peptide
  VARIANT (1)...(19): Xaa = Any Amino Acid
PGTCGEXICAYAXACTGXC

SEQ ID NO: 3630 - protein, 20 aa, Artificial Sequence
  Synthetically generated peptide
  VARIANT (1)...(20): Xaa = Any Amino Acid
PGTCGEXICAYAXACTGXXC

SEQ ID NO: 3631 - protein, 20 aa, Artificial Sequence
  Synthetically generated peptide
  VARIANT (1)...(20): Xaa = Any Amino Acid
PGTCGEXICAYAXACTGXCX

SEQ ID NO: 3632 - protein, 19 aa, Artificial Sequence
  Synthetically generated peptide
  VARIANT (1)...(19): Xaa = Any Amino Acid
PGTCGEXICAYAXACTGCX

SEQ ID NO: 3633 - protein, 20 aa, Artificial Sequence
  Synthetically generated peptide
  VARIANT (1)...(20): Xaa = Any Amino Acid
PGTCGEXICAYAXACTGCXX

SEQ ID NO: 3634 - protein, 18 aa, Artificial Sequence
  Synthetically generated peptide
  VARIANT (1)...(18): Xaa = Any Amino Acid
PGTCGEXICAYAAXCTGC

SEQ ID NO: 3635 - protein, 19 aa, Artificial Sequence
  Synthetically generated peptide
  VARIANT (1)...(19): Xaa = Any Amino Acid
PGTCGEXICAYAAXXCTGC

SEQ ID NO: 3636 - protein, 20 aa, Artificial Sequence
  Synthetically generated peptide
  VARIANT (1)...(20): Xaa = Any Amino Acid
PGTCGEXICAYAAXXXCTGC

SEQ ID NO: 3637 - protein, 20 aa, Artificial Sequence
  Synthetically generated peptide
  VARIANT (1)...(20): Xaa = Any Amino Acid
PGTCGEXICAYAAXXCXTGC

SEQ ID NO: 3638 - protein, 20 aa, Artificial Sequence
  Synthetically generated peptide
  VARIANT (1)...(20): Xaa = Any Amino Acid
PGTCGEXICAYAAXXCTXGC

SEQ ID NO: 3639 - protein, 20 aa, Artificial Sequence
  Synthetically generated peptide
  VARIANT (1)...(20): Xaa = Any Amino Acid
PGTCGEXICAYAAXXCTGXC

SEQ ID NO: 3640 - protein, 20 aa, Artificial Sequence
  Synthetically generated peptide
  VARIANT (1)...(20): Xaa = Any Amino Acid
PGTCGEXICAYAAXXCTGCX

SEQ ID NO: 3641 - protein, 19 aa, Artificial Sequence
  Synthetically generated peptide
  VARIANT (1)...(19): Xaa = Any Amino Acid
PGTCGEXICAYAAXCXTGC

SEQ ID NO: 3642 - protein, 20 aa, Artificial Sequence
  Synthetically generated peptide
  VARIANT (1)...(20): Xaa = Any Amino Acid
PGTCGEXICAYAAXCXXTGC

SEQ ID NO: 3643 - protein, 20 aa, Artificial Sequence
  Synthetically generated peptide
  VARIANT (1)...(20): Xaa = Any Amino Acid
PGTCGEXICAYAAXCXTXGC

SEQ ID NO: 3644 - protein, 20 aa, Artificial Sequence
  Synthetically generated peptide
  VARIANT (1)...(20): Xaa = Any Amino Acid
PGTCGEXICAYAAXCXTGXC

SEQ ID NO: 3645 - protein, 20 aa, Artificial Sequence
  Synthetically generated peptide
  VARIANT (1)...(20): Xaa = Any Amino Acid
PGTCGEXICAYAAXCXTGCX

SEQ ID NO: 3646 - protein, 19 aa, Artificial Sequence
  Synthetically generated peptide
  VARIANT (1)...(19): Xaa = Any Amino Acid
PGTCGEXICAYAAXCTXGC

SEQ ID NO: 3647 - protein, 20 aa, Artificial Sequence
  Synthetically generated peptide
  VARIANT (1)...(20): Xaa = Any Amino Acid
PGTCGEXICAYAAXCTXXGC

SEQ ID NO: 3648 - protein, 20 aa, Artificial Sequence
  Synthetically generated peptide
  VARIANT (1)...(20): Xaa = Any Amino Acid
PGTCGEXICAYAAXCTXGXC

SEQ ID NO: 3649 - protein, 20 aa, Artificial Sequence
  Synthetically generated peptide
  VARIANT (1)...(20): Xaa = Any Amino Acid
PGTCGEXICAYAAXCTXGCX

SEQ ID NO: 3650 - protein, 19 aa, Artificial Sequence
  Synthetically generated peptide
  VARIANT (1)...(19): Xaa = Any Amino Acid
PGTCGEXICAYAAXCTGXC

SEQ ID NO: 3651 - protein, 20 aa, Artificial Sequence
  Synthetically generated peptide
  VARIANT (1)...(20): Xaa = Any Amino Acid
PGTCGEXICAYAAXCTGXXC

SEQ ID NO: 3652 - protein, 20 aa, Artificial Sequence
  Synthetically generated peptide
  VARIANT (1)...(20): Xaa = Any Amino Acid
PGTCGEXICAYAAXCTGXCX

SEQ ID NO: 3653 - protein, 19 aa, Artificial Sequence
  Synthetically generated peptide
  VARIANT (1)...(19): Xaa = Any Amino Acid
PGTCGEXICAYAAXCTGCX

SEQ ID NO: 3654 - protein, 20 aa, Artificial Sequence
  Synthetically generated peptide
  VARIANT (1)...(20): Xaa = Any Amino Acid
PGTCGEXICAYAAXCTGCXX

SEQ ID NO: 3655 - protein, 18 aa, Artificial Sequence
  Synthetically generated peptide
  VARIANT (1)...(18): Xaa = Any Amino Acid
PGTCGEXICAYAACXTGC

SEQ ID NO: 3656 - protein, 19 aa, Artificial Sequence
  Synthetically generated peptide
  VARIANT (1)...(19): Xaa = Any Amino Acid
PGTCGEXICAYAACXXTGC

SEQ ID NO: 3657 - protein, 20 aa, Artificial Sequence
  Synthetically generated peptide
  VARIANT (1)...(20): Xaa = Any Amino Acid
PGTCGEXICAYAACXXXTGC

SEQ ID NO: 3658 - protein, 20 aa, Artificial Sequence
  Synthetically generated peptide
  VARIANT (1)...(20): Xaa = Any Amino Acid
PGTCGEXICAYAACXXTXGC

SEQ ID NO: 3659 - protein, 20 aa, Artificial Sequence
  Synthetically generated peptide
  VARIANT (1)...(20): Xaa = Any Amino Acid
PGTCGEXICAYAACXXTGXC

SEQ ID NO: 3660 - protein, 20 aa, Artificial Sequence
  Synthetically generated peptide
  VARIANT (1)...(20): Xaa = Any Amino Acid
PGTCGEXICAYAACXXTGCX

SEQ ID NO: 3661 - protein, 19 aa, Artificial Sequence
  Synthetically generated peptide
  VARIANT (1)...(19): Xaa = Any Amino Acid
PGTCGEXICAYAACXTXGC

SEQ ID NO: 3662 - protein, 20 aa, Artificial Sequence
  Synthetically generated peptide
  VARIANT (1)...(20): Xaa = Any Amino Acid
PGTCGEXICAYAACXTXXGC

SEQ ID NO: 3663 - protein, 20 aa, Artificial Sequence
  Synthetically generated peptide
  VARIANT (1)...(20): Xaa = Any Amino Acid
PGTCGEXICAYAACXTXGXC

SEQ ID NO: 3664 - protein, 20 aa, Artificial Sequence
  Synthetically generated peptide
  VARIANT (1)...(20): Xaa = Any Amino Acid
PGTCGEXICAYAACXTXGCX

SEQ ID NO: 3665 - protein, 19 aa, Artificial Sequence
  Synthetically generated peptide
  VARIANT (1)...(19): Xaa = Any Amino Acid
PGTCGEXICAYAACXTGXC

SEQ ID NO: 3666 - protein, 20 aa, Artificial Sequence
  Synthetically generated peptide
  VARIANT (1)...(20): Xaa = Any Amino Acid
PGTCGEXICAYAACXTGXXC

SEQ ID NO: 3667 - protein, 20 aa, Artificial Sequence
  Synthetically generated peptide
  VARIANT (1)...(20): Xaa = Any Amino Acid
PGTCGEXICAYAACXTGXCX

SEQ ID NO: 3668 - protein, 19 aa, Artificial Sequence
  Synthetically generated peptide
  VARIANT (1)...(19): Xaa = Any Amino Acid
PGTCGEXICAYAACXTGCX

SEQ ID NO: 3669 - protein, 20 aa, Artificial Sequence
  Synthetically generated peptide
  VARIANT (1)...(20): Xaa = Any Amino Acid
PGTCGEXICAYAACXTGCXX

SEQ ID NO: 3670 - protein, 18 aa, Artificial Sequence
  Synthetically generated peptide
  VARIANT (1)...(18): Xaa = Any Amino Acid
PGTCGEXICAYAACTXGC

SEQ ID NO: 3671 - protein, 19 aa, Artificial Sequence
  Synthetically generated peptide
  VARIANT (1)...(19): Xaa = Any Amino Acid
PGTCGEXICAYAACTXXGC

SEQ ID NO: 3672 - protein, 20 aa, Artificial Sequence
  Synthetically generated peptide
  VARIANT (1)...(20): Xaa = Any Amino Acid
PGTCGEXICAYAACTXXXGC

SEQ ID NO: 3673 - protein, 20 aa, Artificial Sequence
  Synthetically generated peptide
  VARIANT (1)...(20): Xaa = Any Amino Acid
PGTCGEXICAYAACTXXGXC

SEQ ID NO: 3674 - protein, 20 aa, Artificial Sequence
  Synthetically generated peptide
  VARIANT (1)...(20): Xaa = Any Amino Acid
PGTCGEXICAYAACTXXGCX

SEQ ID NO: 3675 - protein, 19 aa, Artificial Sequence
  Synthetically generated peptide
  VARIANT (1)...(19): Xaa = Any Amino Acid
PGTCGEXICAYAACTXGXC

SEQ ID NO: 3676 - protein, 20 aa, Artificial Sequence
  Synthetically generated peptide
  VARIANT (1)...(20): Xaa = Any Amino Acid
PGTCGEXICAYAACTXGXXC

SEQ ID NO: 3677 - protein, 20 aa, Artificial Sequence
  Synthetically generated peptide
  VARIANT (1)...(20): Xaa = Any Amino Acid
PGTCGEXICAYAACTXGXCX

SEQ ID NO: 3678 - protein, 19 aa, Artificial Sequence
  Synthetically generated peptide
  VARIANT (1)...(19): Xaa = Any Amino Acid
PGTCGEXICAYAACTXGCX

SEQ ID NO: 3679 - protein, 20 aa, Artificial Sequence
  Synthetically generated peptide
  VARIANT (1)...(20): Xaa = Any Amino Acid
PGTCGEXICAYAACTXGCXX

SEQ ID NO: 3680 - protein, 18 aa, Artificial Sequence
  Synthetically generated peptide
  VARIANT (1)...(18): Xaa = Any Amino Acid
PGTCGEXICAYAACTGXC

SEQ ID NO: 3681 - protein, 19 aa, Artificial Sequence
  Synthetically generated peptide
  VARIANT (1)...(19): Xaa = Any Amino Acid
PGTCGEXICAYAACTGXXC

SEQ ID NO: 3682 - protein, 20 aa, Artificial Sequence
  Synthetically generated peptide
  VARIANT (1)...(20): Xaa = Any Amino Acid
PGTCGEXICAYAACTGXXXC

SEQ ID NO: 3683 - protein, 20 aa, Artificial Sequence
  Synthetically generated peptide
  VARIANT (1)...(20): Xaa = Any Amino Acid
PGTCGEXICAYAACTGXXCX

SEQ ID NO: 3684 - protein, 19 aa, Artificial Sequence
  Synthetically generated peptide
  VARIANT (1)...(19): Xaa = Any Amino Acid
PGTCGEXICAYAACTGXCX

SEQ ID NO: 3685 - protein, 20 aa, Artificial Sequence
  Synthetically generated peptide
  VARIANT (1)...(20): Xaa = Any Amino Acid
PGTCGEXICAYAACTGXCXX

SEQ ID NO: 3686 - protein, 18 aa, Artificial Sequence
  Synthetically generated peptide
  VARIANT (1)...(18): Xaa = Any Amino Acid
PGTCGEXICAYAACTGCX

SEQ ID NO: 3687 - protein, 19 aa, Artificial Sequence
  Synthetically generated peptide
  VARIANT (1)...(19): Xaa = Any Amino Acid
PGTCGEXICAYAACTGCXX

SEQ ID NO: 3688 - protein, 20 aa, Artificial Sequence
  Synthetically generated peptide
  VARIANT (1)...(20): Xaa = Any Amino Acid
PGTCGEXICAYAACTGCXXX

SEQ ID NO: 3689 - protein, 17 aa, Artificial Sequence
  Synthetically generated peptide
  VARIANT (1)...(17): Xaa = Any Amino Acid
PGTCGEIXCAYAACTGC

SEQ ID NO: 3690 - protein, 18 aa, Artificial Sequence
  Synthetically generated peptide
  VARIANT (1)...(18): Xaa = Any Amino Acid
PGTCGEIXXCAYAACTGC

SEQ ID NO: 3691 - protein, 19 aa, Artificial Sequence
  Synthetically generated peptide
  VARIANT (1)...(19): Xaa = Any Amino Acid
PGTCGEIXXXCAYAACTGC

SEQ ID NO: 3692 - protein, 20 aa, Artificial Sequence
  Synthetically generated peptide
  VARIANT (1)...(20): Xaa = Any Amino Acid
PGTCGEIXXXXCAYAACTGC

SEQ ID NO: 3693 - protein, 20 aa, Artificial Sequence
  Synthetically generated peptide
  VARIANT (1)...(20): Xaa = Any Amino Acid
PGTCGEIXXXCXAYAACTGC

SEQ ID NO: 3694 - protein, 20 aa, Artificial Sequence
  Synthetically generated peptide
  VARIANT (1)...(20): Xaa = Any Amino Acid
PGTCGEIXXXCAXYAACTGC

SEQ ID NO: 3695 - protein, 20 aa, Artificial Sequence
  Synthetically generated peptide
  VARIANT (1)...(20): Xaa = Any Amino Acid
PGTCGEIXXXCAYXAACTGC

SEQ ID NO: 3696 - protein, 20 aa, Artificial Sequence
  Synthetically generated peptide
  VARIANT (1)...(20): Xaa = Any Amino Acid
PGTCGEIXXXCAYAXACTGC

SEQ ID NO: 3697 - protein, 20 aa, Artificial Sequence
  Synthetically generated peptide
  VARIANT (1)...(20): Xaa = Any Amino Acid
PGTCGEIXXXCAYAAXCTGC

SEQ ID NO: 3698 - protein, 20 aa, Artificial Sequence
  Synthetically generated peptide
  VARIANT (1)...(20): Xaa = Any Amino Acid
PGTCGEIXXXCAYAACXTGC

SEQ ID NO: 3699 - protein, 20 aa, Artificial Sequence
  Synthetically generated peptide
  VARIANT (1)...(20): Xaa = Any Amino Acid
PGTCGEIXXXCAYAACTXGC

SEQ ID NO: 3700 - protein, 20 aa, Artificial Sequence
  Synthetically generated peptide
  VARIANT (1)...(20): Xaa = Any Amino Acid
PGTCGEIXXXCAYAACTGXC

SEQ ID NO: 3701 - protein, 20 aa, Artificial Sequence
  Synthetically generated peptide
  VARIANT (1)...(20): Xaa = Any Amino Acid
PGTCGEIXXXCAYAACTGCX

SEQ ID NO: 3702 - protein, 19 aa, Artificial Sequence
  Synthetically generated peptide
  VARIANT (1)...(19): Xaa = Any Amino Acid
PGTCGEIXXCXAYAACTGC

SEQ ID NO: 3703 - protein, 20 aa, Artificial Sequence
  Synthetically generated peptide
  VARIANT (1)...(20): Xaa = Any Amino Acid
PGTCGEIXXCXXAYAACTGC

SEQ ID NO: 3704 - protein, 20 aa, Artificial Sequence
  Synthetically generated peptide
  VARIANT (1)...(20): Xaa = Any Amino Acid
PGTCGEIXXCXAXYAACTGC

SEQ ID NO: 3705 - protein, 20 aa, Artificial Sequence
  Synthetically generated peptide
  VARIANT (1)...(20): Xaa = Any Amino Acid
PGTCGEIXXCXAYXAACTGC

SEQ ID NO: 3706 - protein, 20 aa, Artificial Sequence
  Synthetically generated peptide
  VARIANT (1)...(20): Xaa = Any Amino Acid
PGTCGEIXXCXAYAXACTGC

SEQ ID NO: 3707 - protein, 20 aa, Artificial Sequence
  Synthetically generated peptide
  VARIANT (1)...(20): Xaa = Any Amino Acid
PGTCGEIXXCXAYAAXCTGC

SEQ ID NO: 3708 - protein, 20 aa, Artificial Sequence
  Synthetically generated peptide
  VARIANT (1)...(20): Xaa = Any Amino Acid
PGTCGEIXXCXAYAACXTGC

SEQ ID NO: 3709 - protein, 20 aa, Artificial Sequence
  Synthetically generated peptide
  VARIANT (1)...(20): Xaa = Any Amino Acid
PGTCGEIXXCXAYAACTXGC

SEQ ID NO: 3710 - protein, 20 aa, Artificial Sequence
  Synthetically generated peptide
  VARIANT (1)...(20): Xaa = Any Amino Acid
PGTCGEIXXCXAYAACTGXC

SEQ ID NO: 3711 - protein, 20 aa, Artificial Sequence
  Synthetically generated peptide
  VARIANT (1)...(20): Xaa = Any Amino Acid
PGTCGEIXXCXAYAACTGCX

SEQ ID NO: 3712 - protein, 19 aa, Artificial Sequence
  Synthetically generated peptide
  VARIANT (1)...(19): Xaa = Any Amino Acid
PGTCGEIXXCAXYAACTGC

SEQ ID NO: 3713 - protein, 20 aa, Artificial Sequence
  Synthetically generated peptide
  VARIANT (1)...(20): Xaa = Any Amino Acid
PGTCGEIXXCAXXYAACTGC

SEQ ID NO: 3714 - protein, 20 aa, Artificial Sequence
  Synthetically generated peptide
  VARIANT (1)...(20): Xaa = Any Amino Acid
PGTCGEIXXCAXYXAACTGC

SEQ ID NO: 3715 - protein, 20 aa, Artificial Sequence
  Synthetically generated peptide
  VARIANT (1)...(20): Xaa = Any Amino Acid
PGTCGEIXXCAXYAXACTGC

SEQ ID NO: 3716 - protein, 20 aa, Artificial Sequence
  Synthetically generated peptide
  VARIANT (1)...(20): Xaa = Any Amino Acid
PGTCGEIXXCAXYAAXCTGC

SEQ ID NO: 3717 - protein, 20 aa, Artificial Sequence
  Synthetically generated peptide
  VARIANT (1)...(20): Xaa = Any Amino Acid
PGTCGEIXXCAXYAACXTGC

SEQ ID NO: 3718 - protein, 20 aa, Artificial Sequence
  Synthetically generated peptide
  VARIANT (1)...(20): Xaa = Any Amino Acid
PGTCGEIXXCAXYAACTXGC

SEQ ID NO: 3719 - protein, 20 aa, Artificial Sequence
  Synthetically generated peptide
  VARIANT (1)...(20): Xaa = Any Amino Acid
PGTCGEIXXCAXYAACTGXC

SEQ ID NO: 3720 - protein, 20 aa, Artificial Sequence
  Synthetically generated peptide
  VARIANT (1)...(20): Xaa = Any Amino Acid
PGTCGEIXXCAXYAACTGCX

SEQ ID NO: 3721 - protein, 19 aa, Artificial Sequence
  Synthetically generated peptide
  VARIANT (1)...(19): Xaa = Any Amino Acid
PGTCGEIXXCAYXAACTGC

SEQ ID NO: 3722 - protein, 20 aa, Artificial Sequence
  Synthetically generated peptide
  VARIANT (1)...(20): Xaa = Any Amino Acid
PGTCGEIXXCAYXXAACTGC

SEQ ID NO: 3723 - protein, 20 aa, Artificial Sequence
  Synthetically generated peptide
  VARIANT (1)...(20): Xaa = Any Amino Acid
PGTCGEIXXCAYXAXACTGC

SEQ ID NO: 3724 - protein, 20 aa, Artificial Sequence
  Synthetically generated peptide
  VARIANT (1)...(20): Xaa = Any Amino Acid
PGTCGEIXXCAYXAAXCTGC

SEQ ID NO: 3725 - protein, 20 aa, Artificial Sequence
  Synthetically generated peptide
  VARIANT (1)...(20): Xaa = Any Amino Acid
PGTCGEIXXCAYXAACXTGC

SEQ ID NO: 3726 - protein, 20 aa, Artificial Sequence
  Synthetically generated peptide
  VARIANT (1)...(20): Xaa = Any Amino Acid
PGTCGEIXXCAYXAACTXGC

SEQ ID NO: 3727 - protein, 20 aa, Artificial Sequence
  Synthetically generated peptide
  VARIANT (1)...(20): Xaa = Any Amino Acid
PGTCGEIXXCAYXAACTGXC

SEQ ID NO: 3728 - protein, 20 aa, Artificial Sequence
  Synthetically generated peptide
  VARIANT (1)...(20): Xaa = Any Amino Acid
PGTCGEIXXCAYXAACTGCX

SEQ ID NO: 3729 - protein, 19 aa, Artificial Sequence
  Synthetically generated peptide
  VARIANT (1)...(19): Xaa = Any Amino Acid
PGTCGEIXXCAYAXACTGC

SEQ ID NO: 3730 - protein, 20 aa, Artificial Sequence
  Synthetically generated peptide
  VARIANT (1)...(20): Xaa = Any Amino Acid
PGTCGEIXXCAYAXXACTGC

SEQ ID NO: 3731 - protein, 20 aa, Artificial Sequence
  Synthetically generated peptide
  VARIANT (1)...(20): Xaa = Any Amino Acid
PGTCGEIXXCAYAXAXCTGC

SEQ ID NO: 3732 - protein, 20 aa, Artificial Sequence
  Synthetically generated peptide
  VARIANT (1)...(20): Xaa = Any Amino Acid
PGTCGEIXXCAYAXACXTGC

SEQ ID NO: 3733 - protein, 20 aa, Artificial Sequence
  Synthetically generated peptide
  VARIANT (1)...(20): Xaa = Any Amino Acid
PGTCGEIXXCAYAXACTXGC

SEQ ID NO: 3734 - protein, 20 aa, Artificial Sequence
  Synthetically generated peptide
  VARIANT (1)...(20): Xaa = Any Amino Acid
PGTCGEIXXCAYAXACTGXC

SEQ ID NO: 3735 - protein, 20 aa, Artificial Sequence
  Synthetically generated peptide
  VARIANT (1)...(20): Xaa = Any Amino Acid
PGTCGEIXXCAYAXACTGCX

SEQ ID NO: 3736 - protein, 19 aa, Artificial Sequence
  Synthetically generated peptide
  VARIANT (1)...(19): Xaa = Any Amino Acid
PGTCGEIXXCAYAAXCTGC

SEQ ID NO: 3737 - protein, 20 aa, Artificial Sequence
  Synthetically generated peptide
  VARIANT (1)...(20): Xaa = Any Amino Acid
PGTCGEIXXCAYAAXXCTGC

SEQ ID NO: 3738 - protein, 20 aa, Artificial Sequence
  Synthetically generated peptide
  VARIANT (1)...(20): Xaa = Any Amino Acid
PGTCGEIXXCAYAAXCXTGC

SEQ ID NO: 3739 - protein, 20 aa, Artificial Sequence
  Synthetically generated peptide
  VARIANT (1)...(20): Xaa = Any Amino Acid
PGTCGEIXXCAYAAXCTXGC

SEQ ID NO: 3740 - protein, 20 aa, Artificial Sequence
  Synthetically generated peptide
  VARIANT (1)...(20): Xaa = Any Amino Acid
PGTCGEIXXCAYAAXCTGXC

SEQ ID NO: 3741 - protein, 20 aa, Artificial Sequence
  Synthetically generated peptide
  VARIANT (1)...(20): Xaa = Any Amino Acid
PGTCGEIXXCAYAAXCTGCX

SEQ ID NO: 3742 - protein, 19 aa, Artificial Sequence
  Synthetically generated peptide
  VARIANT (1)...(19): Xaa = Any Amino Acid
PGTCGEIXXCAYAACXTGC

SEQ ID NO: 3743 - protein, 20 aa, Artificial Sequence
  Synthetically generated peptide
  VARIANT (1)...(20): Xaa = Any Amino Acid
PGTCGEIXXCAYAACXXTGC

SEQ ID NO: 3744 - protein, 20 aa, Artificial Sequence
  Synthetically generated peptide
  VARIANT (1)...(20): Xaa = Any Amino Acid
PGTCGEIXXCAYAACXTXGC

SEQ ID NO: 3745 - protein, 20 aa, Artificial Sequence
  Synthetically generated peptide
  VARIANT (1)...(20): Xaa = Any Amino Acid
PGTCGEIXXCAYAACXTGXC

SEQ ID NO: 3746 - protein, 20 aa, Artificial Sequence
  Synthetically generated peptide
  VARIANT (1)...(20): Xaa = Any Amino Acid
PGTCGEIXXCAYAACXTGCX

SEQ ID NO: 3747 - protein, 19 aa, Artificial Sequence
  Synthetically generated peptide
  VARIANT (1)...(19): Xaa = Any Amino Acid
PGTCGEIXXCAYAACTXGC

SEQ ID NO: 3748 - protein, 20 aa, Artificial Sequence
  Synthetically generated peptide
  VARIANT (1)...(20): Xaa = Any Amino Acid
PGTCGEIXXCAYAACTXXGC

SEQ ID NO: 3749 - protein, 20 aa, Artificial Sequence
  Synthetically generated peptide
  VARIANT (1)...(20): Xaa = Any Amino Acid
PGTCGEIXXCAYAACTXGXC

SEQ ID NO: 3750 - protein, 20 aa, Artificial Sequence
  Synthetically generated peptide
  VARIANT (1)...(20): Xaa = Any Amino Acid
PGTCGEIXXCAYAACTXGCX

SEQ ID NO: 3751 - protein, 19 aa, Artificial Sequence
  Synthetically generated peptide
  VARIANT (1)...(19): Xaa = Any Amino Acid
PGTCGEIXXCAYAACTGXC

SEQ ID NO: 3752 - protein, 20 aa, Artificial Sequence
  Synthetically generated peptide
  VARIANT (1)...(20): Xaa = Any Amino Acid
PGTCGEIXXCAYAACTGXXC

SEQ ID NO: 3753 - protein, 20 aa, Artificial Sequence
  Synthetically generated peptide
  VARIANT (1)...(20): Xaa = Any Amino Acid
PGTCGEIXXCAYAACTGXCX

SEQ ID NO: 3754 - protein, 19 aa, Artificial Sequence
  Synthetically generated peptide
  VARIANT (1)...(19): Xaa = Any Amino Acid
PGTCGEIXXCAYAACTGCX

SEQ ID NO: 3755 - protein, 20 aa, Artificial Sequence
  Synthetically generated peptide
  VARIANT (1)...(20): Xaa = Any Amino Acid
PGTCGEIXXCAYAACTGCXX

SEQ ID NO: 3756 - protein, 18 aa, Artificial Sequence
  Synthetically generated peptide
  VARIANT (1)...(18): Xaa = Any Amino Acid
PGTCGEIXCXAYAACTGC

SEQ ID NO: 3757 - protein, 19 aa, Artificial Sequence
  Synthetically generated peptide
  VARIANT (1)...(19): Xaa = Any Amino Acid
PGTCGEIXCXXAYAACTGC

SEQ ID NO: 3758 - protein, 20 aa, Artificial Sequence
  Synthetically generated peptide
  VARIANT (1)...(20): Xaa = Any Amino Acid
PGTCGEIXCXXXAYAACTGC

SEQ ID NO: 3759 - protein, 20 aa, Artificial Sequence
  Synthetically generated peptide
  VARIANT (1)...(20): Xaa = Any Amino Acid
PGTCGEIXCXXAXYAACTGC

SEQ ID NO: 3760 - protein, 20 aa, Artificial Sequence
  Synthetically generated peptide
  VARIANT (1)...(20): Xaa = Any Amino Acid
PGTCGEIXCXXAYXAACTGC

SEQ ID NO: 3761 - protein, 20 aa, Artificial Sequence
  Synthetically generated peptide
  VARIANT (1)...(20): Xaa = Any Amino Acid
PGTCGEIXCXXAYAXACTGC

SEQ ID NO: 3762 - protein, 20 aa, Artificial Sequence
  Synthetically generated peptide
  VARIANT (1)...(20): Xaa = Any Amino Acid
PGTCGEIXCXXAYAAXCTGC

SEQ ID NO: 3763 - protein, 20 aa, Artificial Sequence
  Synthetically generated peptide
  VARIANT (1)...(20): Xaa = Any Amino Acid
PGTCGEIXCXXAYAACXTGC

SEQ ID NO: 3764 - protein, 20 aa, Artificial Sequence
  Synthetically generated peptide
  VARIANT (1)...(20): Xaa = Any Amino Acid
PGTCGEIXCXXAYAACTXGC

SEQ ID NO: 3765 - protein, 20 aa, Artificial Sequence
  Synthetically generated peptide
  VARIANT (1)...(20): Xaa = Any Amino Acid
PGTCGEIXCXXAYAACTGXC

SEQ ID NO: 3766 - protein, 20 aa, Artificial Sequence
  Synthetically generated peptide
  VARIANT (1)...(20): Xaa = Any Amino Acid
PGTCGEIXCXXAYAACTGCX

SEQ ID NO: 3767 - protein, 19 aa, Artificial Sequence
  Synthetically generated peptide
  VARIANT (1)...(19): Xaa = Any Amino Acid
PGTCGEIXCXAXYAACTGC

SEQ ID NO: 3768 - protein, 20 aa, Artificial Sequence
  Synthetically generated peptide
  VARIANT (1)...(20): Xaa = Any Amino Acid
PGTCGEIXCXAXXYAACTGC

SEQ ID NO: 3769 - protein, 20 aa, Artificial Sequence
  Synthetically generated peptide
  VARIANT (1)...(20): Xaa = Any Amino Acid
PGTCGEIXCXAXYXAACTGC

SEQ ID NO: 3770 - protein, 20 aa, Artificial Sequence
  Synthetically generated peptide
  VARIANT (1)...(20): Xaa = Any Amino Acid
PGTCGEIXCXAXYAXACTGC

SEQ ID NO: 3771 - protein, 20 aa, Artificial Sequence
  Synthetically generated peptide
  VARIANT (1)...(20): Xaa = Any Amino Acid
PGTCGEIXCXAXYAAXCTGC

SEQ ID NO: 3772 - protein, 20 aa, Artificial Sequence
  Synthetically generated peptide
  VARIANT (1)...(20): Xaa = Any Amino Acid
PGTCGEIXCXAXYAACXTGC

SEQ ID NO: 3773 - protein, 20 aa, Artificial Sequence
  Synthetically generated peptide
  VARIANT (1)...(20): Xaa = Any Amino Acid
PGTCGEIXCXAXYAACTXGC

SEQ ID NO: 3774 - protein, 20 aa, Artificial Sequence
  Synthetically generated peptide
  VARIANT (1)...(20): Xaa = Any Amino Acid
PGTCGEIXCXAXYAACTGXC

SEQ ID NO: 3775 - protein, 20 aa, Artificial Sequence
  Synthetically generated peptide
  VARIANT (1)...(20): Xaa = Any Amino Acid
PGTCGEIXCXAXYAACTGCX

SEQ ID NO: 3776 - protein, 19 aa, Artificial Sequence
  Synthetically generated peptide
  VARIANT (1)...(19): Xaa = Any Amino Acid
PGTCGEIXCXAYXAACTGC

SEQ ID NO: 3777 - protein, 20 aa, Artificial Sequence
  Synthetically generated peptide
  VARIANT (1)...(20): Xaa = Any Amino Acid
PGTCGEIXCXAYXXAACTGC

SEQ ID NO: 3778 - protein, 20 aa, Artificial Sequence
  Synthetically generated peptide
  VARIANT (1)...(20): Xaa = Any Amino Acid
PGTCGEIXCXAYXAXACTGC

SEQ ID NO: 3779 - protein, 20 aa, Artificial Sequence
  Synthetically generated peptide
  VARIANT (1)...(20): Xaa = Any Amino Acid
PGTCGEIXCXAYXAAXCTGC

SEQ ID NO: 3780 - protein, 20 aa, Artificial Sequence
  Synthetically generated peptide
  VARIANT (1)...(20): Xaa = Any Amino Acid
PGTCGEIXCXAYXAACXTGC

SEQ ID NO: 3781 - protein, 20 aa, Artificial Sequence
  Synthetically generated peptide
  VARIANT (1)...(20): Xaa = Any Amino Acid
PGTCGEIXCXAYXAACTXGC

SEQ ID NO: 3782 - protein, 20 aa, Artificial Sequence
  Synthetically generated peptide
  VARIANT (1)...(20): Xaa = Any Amino Acid
PGTCGEIXCXAYXAACTGXC

SEQ ID NO: 3783 - protein, 20 aa, Artificial Sequence
  Synthetically generated peptide
  VARIANT (1)...(20): Xaa = Any Amino Acid
PGTCGEIXCXAYXAACTGCX

SEQ ID NO: 3784 - protein, 19 aa, Artificial Sequence
  Synthetically generated peptide
  VARIANT (1)...(19): Xaa = Any Amino Acid
PGTCGEIXCXAYAXACTGC

SEQ ID NO: 3785 - protein, 20 aa, Artificial Sequence
  Synthetically generated peptide
  VARIANT (1)...(20): Xaa = Any Amino Acid
PGTCGEIXCXAYAXXACTGC

SEQ ID NO: 3786 - protein, 20 aa, Artificial Sequence
  Synthetically generated peptide
  VARIANT (1)...(20): Xaa = Any Amino Acid
PGTCGEIXCXAYAXAXCTGC

SEQ ID NO: 3787 - protein, 20 aa, Artificial Sequence
  Synthetically generated peptide
  VARIANT (1)...(20): Xaa = Any Amino Acid
PGTCGEIXCXAYAXACXTGC

SEQ ID NO: 3788 - protein, 20 aa, Artificial Sequence
  Synthetically generated peptide
  VARIANT (1)...(20): Xaa = Any Amino Acid
PGTCGEIXCXAYAXACTXGC

SEQ ID NO: 3789 - protein, 20 aa, Artificial Sequence
  Synthetically generated peptide
  VARIANT (1)...(20): Xaa = Any Amino Acid
PGTCGEIXCXAYAXACTGXC

SEQ ID NO: 3790 - protein, 20 aa, Artificial Sequence
  Synthetically generated peptide
  VARIANT (1)...(20): Xaa = Any Amino Acid
PGTCGEIXCXAYAXACTGCX

SEQ ID NO: 3791 - protein, 19 aa, Artificial Sequence
  Synthetically generated peptide
  VARIANT (1)...(19): Xaa = Any Amino Acid
PGTCGEIXCXAYAAXCTGC

SEQ ID NO: 3792 - protein, 20 aa, Artificial Sequence
  Synthetically generated peptide
  VARIANT (1)...(20): Xaa = Any Amino Acid
PGTCGEIXCXAYAAXXCTGC

SEQ ID NO: 3793 - protein, 20 aa, Artificial Sequence
  Synthetically generated peptide
  VARIANT (1)...(20): Xaa = Any Amino Acid
PGTCGEIXCXAYAAXCXTGC

SEQ ID NO: 3794 - protein, 20 aa, Artificial Sequence
  Synthetically generated peptide
  VARIANT (1)...(20): Xaa = Any Amino Acid
PGTCGEIXCXAYAAXCTXGC

SEQ ID NO: 3795 - protein, 20 aa, Artificial Sequence
  Synthetically generated peptide
  VARIANT (1)...(20): Xaa = Any Amino Acid
PGTCGEIXCXAYAAXCTGXC

SEQ ID NO: 3796 - protein, 20 aa, Artificial Sequence
  Synthetically generated peptide
  VARIANT (1)...(20): Xaa = Any Amino Acid
PGTCGEIXCXAYAAXCTGCX

SEQ ID NO: 3797 - protein, 19 aa, Artificial Sequence
  Synthetically generated peptide
  VARIANT (1)...(19): Xaa = Any Amino Acid
PGTCGEIXCXAYAACXTGC

SEQ ID NO: 3798 - protein, 20 aa, Artificial Sequence
  Synthetically generated peptide
  VARIANT (1)...(20): Xaa = Any Amino Acid
PGTCGEIXCXAYAACXXTGC

SEQ ID NO: 3799 - protein, 20 aa, Artificial Sequence
  Synthetically generated peptide
  VARIANT (1)...(20): Xaa = Any Amino Acid
PGTCGEIXCXAYAACXTXGC

SEQ ID NO: 3800 - protein, 20 aa, Artificial Sequence
  Synthetically generated peptide
  VARIANT (1)...(20): Xaa = Any Amino Acid
PGTCGEIXCXAYAACXTGXC

SEQ ID NO: 3801 - protein, 20 aa, Artificial Sequence
  Synthetically generated peptide
  VARIANT (1)...(20): Xaa = Any Amino Acid
PGTCGEIXCXAYAACXTGCX

SEQ ID NO: 3802 - protein, 19 aa, Artificial Sequence
  Synthetically generated peptide
  VARIANT (1)...(19): Xaa = Any Amino Acid
PGTCGEIXCXAYAACTXGC

SEQ ID NO: 3803 - protein, 20 aa, Artificial Sequence
  Synthetically generated peptide
  VARIANT (1)...(20): Xaa = Any Amino Acid
PGTCGEIXCXAYAACTXXGC

SEQ ID NO: 3804 - protein, 20 aa, Artificial Sequence
  Synthetically generated peptide
  VARIANT (1)...(20): Xaa = Any Amino Acid
PGTCGEIXCXAYAACTXGXC

SEQ ID NO: 3805 - protein, 20 aa, Artificial Sequence
  Synthetically generated peptide
  VARIANT (1)...(20): Xaa = Any Amino Acid
PGTCGEIXCXAYAACTXGCX

SEQ ID NO: 3806 - protein, 19 aa, Artificial Sequence
  Synthetically generated peptide
  VARIANT (1)...(19): Xaa = Any Amino Acid
PGTCGEIXCXAYAACTGXC

SEQ ID NO: 3807 - protein, 20 aa, Artificial Sequence
  Synthetically generated peptide
  VARIANT (1)...(20): Xaa = Any Amino Acid
PGTCGEIXCXAYAACTGXXC

SEQ ID NO: 3808 - protein, 20 aa, Artificial Sequence
  Synthetically generated peptide
  VARIANT (1)...(20): Xaa = Any Amino Acid
PGTCGEIXCXAYAACTGXCX

SEQ ID NO: 3809 - protein, 19 aa, Artificial Sequence
  Synthetically generated peptide
  VARIANT (1)...(19): Xaa = Any Amino Acid
PGTCGEIXCXAYAACTGCX

SEQ ID NO: 3810 - protein, 20 aa, Artificial Sequence
  Synthetically generated peptide
  VARIANT (1)...(20): Xaa = Any Amino Acid
PGTCGEIXCXAYAACTGCXX

SEQ ID NO: 3811 - protein, 18 aa, Artificial Sequence
  Synthetically generated peptide
  VARIANT (1)...(18): Xaa = Any Amino Acid
PGTCGEIXCAXYAACTGC

SEQ ID NO: 3812 - protein, 19 aa, Artificial Sequence
  Synthetically generated peptide
  VARIANT (1)...(19): Xaa = Any Amino Acid
PGTCGEIXCAXXYAACTGC

SEQ ID NO: 3813 - protein, 20 aa, Artificial Sequence
  Synthetically generated peptide
  VARIANT (1)...(20): Xaa = Any Amino Acid
PGTCGEIXCAXXXYAACTGC

SEQ ID NO: 3814 - protein, 20 aa, Artificial Sequence
  Synthetically generated peptide
  VARIANT (1)...(20): Xaa = Any Amino Acid
PGTCGEIXCAXXYXAACTGC

SEQ ID NO: 3815 - protein, 20 aa, Artificial Sequence
  Synthetically generated peptide
  VARIANT (1)...(20): Xaa = Any Amino Acid
PGTCGEIXCAXXYAXACTGC

SEQ ID NO: 3816 - protein, 20 aa, Artificial Sequence
  Synthetically generated peptide
  VARIANT (1)...(20): Xaa = Any Amino Acid
PGTCGEIXCAXXYAAXCTGC

SEQ ID NO: 3817 - protein, 20 aa, Artificial Sequence
  Synthetically generated peptide
  VARIANT (1)...(20): Xaa = Any Amino Acid
PGTCGEIXCAXXYAACXTGC

SEQ ID NO: 3818 - protein, 20 aa, Artificial Sequence
  Synthetically generated peptide
  VARIANT (1)...(20): Xaa = Any Amino Acid
PGTCGEIXCAXXYAACTXGC

SEQ ID NO: 3819 - protein, 20 aa, Artificial Sequence
  Synthetically generated peptide
  VARIANT (1)...(20): Xaa = Any Amino Acid
PGTCGEIXCAXXYAACTGXC

SEQ ID NO: 3820 - protein, 20 aa, Artificial Sequence
  Synthetically generated peptide
  VARIANT (1)...(20): Xaa = Any Amino Acid
PGTCGEIXCAXXYAACTGCX

SEQ ID NO: 3821 - protein, 19 aa, Artificial Sequence
  Synthetically generated peptide
  VARIANT (1)...(19): Xaa = Any Amino Acid
PGTCGEIXCAXYXAACTGC

SEQ ID NO: 3822 - protein, 20 aa, Artificial Sequence
  Synthetically generated peptide
  VARIANT (1)...(20): Xaa = Any Amino Acid
PGTCGEIXCAXYXXAACTGC

SEQ ID NO: 3823 - protein, 20 aa, Artificial Sequence
  Synthetically generated peptide
  VARIANT (1)...(20): Xaa = Any Amino Acid
PGTCGEIXCAXYXAXACTGC

SEQ ID NO: 3824 - protein, 20 aa, Artificial Sequence
  Synthetically generated peptide
  VARIANT (1)...(20): Xaa = Any Amino Acid
PGTCGEIXCAXYXAAXCTGC

SEQ ID NO: 3825 - protein, 20 aa, Artificial Sequence
  Synthetically generated peptide
  VARIANT (1)...(20): Xaa = Any Amino Acid
PGTCGEIXCAXYXAACXTGC

SEQ ID NO: 3826 - protein, 20 aa, Artificial Sequence
  Synthetically generated peptide
  VARIANT (1)...(20): Xaa = Any Amino Acid
PGTCGEIXCAXYXAACTXGC

SEQ ID NO: 3827 - protein, 20 aa, Artificial Sequence
  Synthetically generated peptide
  VARIANT (1)...(20): Xaa = Any Amino Acid
PGTCGEIXCAXYXAACTGXC

SEQ ID NO: 3828 - protein, 20 aa, Artificial Sequence
  Synthetically generated peptide
  VARIANT (1)...(20): Xaa = Any Amino Acid
PGTCGEIXCAXYXAACTGCX

SEQ ID NO: 3829 - protein, 19 aa, Artificial Sequence
  Synthetically generated peptide
  VARIANT (1)...(19): Xaa = Any Amino Acid
PGTCGEIXCAXYAXACTGC

SEQ ID NO: 3830 - protein, 20 aa, Artificial Sequence
  Synthetically generated peptide
  VARIANT (1)...(20): Xaa = Any Amino Acid
PGTCGEIXCAXYAXXACTGC

SEQ ID NO: 3831 - protein, 20 aa, Artificial Sequence
  Synthetically generated peptide
  VARIANT (1)...(20): Xaa = Any Amino Acid
PGTCGEIXCAXYAXAXCTGC

SEQ ID NO: 3832 - protein, 20 aa, Artificial Sequence
  Synthetically generated peptide
  VARIANT (1)...(20): Xaa = Any Amino Acid
PGTCGEIXCAXYAXACXTGC

SEQ ID NO: 3833 - protein, 20 aa, Artificial Sequence
  Synthetically generated peptide
  VARIANT (1)...(20): Xaa = Any Amino Acid
PGTCGEIXCAXYAXACTXGC

SEQ ID NO: 3834 - protein, 20 aa, Artificial Sequence
  Synthetically generated peptide
  VARIANT (1)...(20): Xaa = Any Amino Acid
PGTCGEIXCAXYAXACTGXC

SEQ ID NO: 3835 - protein, 20 aa, Artificial Sequence
  Synthetically generated peptide
  VARIANT (1)...(20): Xaa = Any Amino Acid
PGTCGEIXCAXYAXACTGCX

SEQ ID NO: 3836 - protein, 19 aa, Artificial Sequence
  Synthetically generated peptide
  VARIANT (1)...(19): Xaa = Any Amino Acid
PGTCGEIXCAXYAAXCTGC

SEQ ID NO: 3837 - protein, 20 aa, Artificial Sequence
  Synthetically generated peptide
  VARIANT (1)...(20): Xaa = Any Amino Acid
PGTCGEIXCAXYAAXXCTGC

SEQ ID NO: 3838 - protein, 20 aa, Artificial Sequence
  Synthetically generated peptide
  VARIANT (1)...(20): Xaa = Any Amino Acid
PGTCGEIXCAXYAAXCXTGC

SEQ ID NO: 3839 - protein, 20 aa, Artificial Sequence
  Synthetically generated peptide
  VARIANT (1)...(20): Xaa = Any Amino Acid
PGTCGEIXCAXYAAXCTXGC

SEQ ID NO: 3840 - protein, 20 aa, Artificial Sequence
  Synthetically generated peptide
  VARIANT (1)...(20): Xaa = Any Amino Acid
PGTCGEIXCAXYAAXCTGXC

SEQ ID NO: 3841 - protein, 20 aa, Artificial Sequence
  Synthetically generated peptide
  VARIANT (1)...(20): Xaa = Any Amino Acid
PGTCGEIXCAXYAAXCTGCX

SEQ ID NO: 3842 - protein, 19 aa, Artificial Sequence
  Synthetically generated peptide
  VARIANT (1)...(19): Xaa = Any Amino Acid
PGTCGEIXCAXYAACXTGC

SEQ ID NO: 3843 - protein, 20 aa, Artificial Sequence
  Synthetically generated peptide
  VARIANT (1)...(20): Xaa = Any Amino Acid
PGTCGEIXCAXYAACXXTGC

SEQ ID NO: 3844 - protein, 20 aa, Artificial Sequence
  Synthetically generated peptide
  VARIANT (1)...(20): Xaa = Any Amino Acid
PGTCGEIXCAXYAACXTXGC

SEQ ID NO: 3845 - protein, 20 aa, Artificial Sequence
  Synthetically generated peptide
  VARIANT (1)...(20): Xaa = Any Amino Acid
PGTCGEIXCAXYAACXTGXC

SEQ ID NO: 3846 - protein, 20 aa, Artificial Sequence
  Synthetically generated peptide
  VARIANT (1)...(20): Xaa = Any Amino Acid
PGTCGEIXCAXYAACXTGCX

SEQ ID NO: 3847 - protein, 19 aa, Artificial Sequence
  Synthetically generated peptide
  VARIANT (1)...(19): Xaa = Any Amino Acid
PGTCGEIXCAXYAACTXGC

SEQ ID NO: 3848 - protein, 20 aa, Artificial Sequence
  Synthetically generated peptide
  VARIANT (1)...(20): Xaa = Any Amino Acid
PGTCGEIXCAXYAACTXXGC

SEQ ID NO: 3849 - protein, 20 aa, Artificial Sequence
  Synthetically generated peptide
  VARIANT (1)...(20): Xaa = Any Amino Acid
PGTCGEIXCAXYAACTXGXC

SEQ ID NO: 3850 - protein, 20 aa, Artificial Sequence
  Synthetically generated peptide
  VARIANT (1)...(20): Xaa = Any Amino Acid
PGTCGEIXCAXYAACTXGCX

SEQ ID NO: 3851 - protein, 19 aa, Artificial Sequence
  Synthetically generated peptide
  VARIANT (1)...(19): Xaa = Any Amino Acid
PGTCGEIXCAXYAACTGXC

SEQ ID NO: 3852 - protein, 20 aa, Artificial Sequence
  Synthetically generated peptide
  VARIANT (1)...(20): Xaa = Any Amino Acid
PGTCGEIXCAXYAACTGXXC

SEQ ID NO: 3853 - protein, 20 aa, Artificial Sequence
  Synthetically generated peptide
  VARIANT (1)...(20): Xaa = Any Amino Acid
PGTCGEIXCAXYAACTGXCX

SEQ ID NO: 3854 - protein, 19 aa, Artificial Sequence
  Synthetically generated peptide
  VARIANT (1)...(19): Xaa = Any Amino Acid
PGTCGEIXCAXYAACTGCX

SEQ ID NO: 3855 - protein, 20 aa, Artificial Sequence
  Synthetically generated peptide
  VARIANT (1)...(20): Xaa = Any Amino Acid
PGTCGEIXCAXYAACTGCXX

SEQ ID NO: 3856 - protein, 18 aa, Artificial Sequence
  Synthetically generated peptide
  VARIANT (1)...(18): Xaa = Any Amino Acid
PGTCGEIXCAYXAACTGC

SEQ ID NO: 3857 - protein, 19 aa, Artificial Sequence
  Synthetically generated peptide
  VARIANT (1)...(19): Xaa = Any Amino Acid
PGTCGEIXCAYXXAACTGC

SEQ ID NO: 3858 - protein, 20 aa, Artificial Sequence
  Synthetically generated peptide
  VARIANT (1)...(20): Xaa = Any Amino Acid
PGTCGEIXCAYXXXAACTGC

SEQ ID NO: 3859 - protein, 20 aa, Artificial Sequence
  Synthetically generated peptide
  VARIANT (1)...(20): Xaa = Any Amino Acid
PGTCGEIXCAYXXAXACTGC

SEQ ID NO: 3860 - protein, 20 aa, Artificial Sequence
  Synthetically generated peptide
  VARIANT (1)...(20): Xaa = Any Amino Acid
PGTCGEIXCAYXXAAXCTGC

SEQ ID NO: 3861 - protein, 20 aa, Artificial Sequence
  Synthetically generated peptide
  VARIANT (1)...(20): Xaa = Any Amino Acid
PGTCGEIXCAYXXAACXTGC

SEQ ID NO: 3862 - protein, 20 aa, Artificial Sequence
  Synthetically generated peptide
  VARIANT (1)...(20): Xaa = Any Amino Acid
PGTCGEIXCAYXXAACTXGC

SEQ ID NO: 3863 - protein, 20 aa, Artificial Sequence
  Synthetically generated peptide
  VARIANT (1)...(20): Xaa = Any Amino Acid
PGTCGEIXCAYXXAACTGXC

SEQ ID NO: 3864 - protein, 20 aa, Artificial Sequence
  Synthetically generated peptide
  VARIANT (1)...(20): Xaa = Any Amino Acid
PGTCGEIXCAYXXAACTGCX

SEQ ID NO: 3865 - protein, 19 aa, Artificial Sequence
  Synthetically generated peptide
  VARIANT (1)...(19): Xaa = Any Amino Acid
PGTCGEIXCAYXAXACTGC

SEQ ID NO: 3866 - protein, 20 aa, Artificial Sequence
  Synthetically generated peptide
  VARIANT (1)...(20): Xaa = Any Amino Acid
PGTCGEIXCAYXAXXACTGC

SEQ ID NO: 3867 - protein, 20 aa, Artificial Sequence
  Synthetically generated peptide
  VARIANT (1)...(20): Xaa = Any Amino Acid
PGTCGEIXCAYXAXAXCTGC

SEQ ID NO: 3868 - protein, 20 aa, Artificial Sequence
  Synthetically generated peptide
  VARIANT (1)...(20): Xaa = Any Amino Acid
PGTCGEIXCAYXAXACXTGC

SEQ ID NO: 3869 - protein, 20 aa, Artificial Sequence
  Synthetically generated peptide
  VARIANT (1)...(20): Xaa = Any Amino Acid
PGTCGEIXCAYXAXACTXGC

SEQ ID NO: 3870 - protein, 20 aa, Artificial Sequence
  Synthetically generated peptide
  VARIANT (1)...(20): Xaa = Any Amino Acid
PGTCGEIXCAYXAXACTGXC

SEQ ID NO: 3871 - protein, 20 aa, Artificial Sequence
  Synthetically generated peptide
  VARIANT (1)...(20): Xaa = Any Amino Acid
PGTCGEIXCAYXAXACTGCX

SEQ ID NO: 3872 - protein, 19 aa, Artificial Sequence
  Synthetically generated peptide
  VARIANT (1)...(19): Xaa = Any Amino Acid
PGTCGEIXCAYXAAXCTGC

SEQ ID NO: 3873 - protein, 20 aa, Artificial Sequence
  Synthetically generated peptide
  VARIANT (1)...(20): Xaa = Any Amino Acid
PGTCGEIXCAYXAAXXCTGC

SEQ ID NO: 3874 - protein, 20 aa, Artificial Sequence
  Synthetically generated peptide
  VARIANT (1)...(20): Xaa = Any Amino Acid
PGTCGEIXCAYXAAXCXTGC

SEQ ID NO: 3875 - protein, 20 aa, Artificial Sequence
  Synthetically generated peptide
  VARIANT (1)...(20): Xaa = Any Amino Acid
PGTCGEIXCAYXAAXCTXGC

SEQ ID NO: 3876 - protein, 20 aa, Artificial Sequence
  Synthetically generated peptide
  VARIANT (1)...(20): Xaa = Any Amino Acid
PGTCGEIXCAYXAAXCTGXC

SEQ ID NO: 3877 - protein, 20 aa, Artificial Sequence
  Synthetically generated peptide
  VARIANT (1)...(20): Xaa = Any Amino Acid
PGTCGEIXCAYXAAXCTGCX

SEQ ID NO: 3878 - protein, 19 aa, Artificial Sequence
  Synthetically generated peptide
  VARIANT (1)...(19): Xaa = Any Amino Acid
PGTCGEIXCAYXAACXTGC

SEQ ID NO: 3879 - protein, 20 aa, Artificial Sequence
  Synthetically generated peptide
  VARIANT (1)...(20): Xaa = Any Amino Acid
PGTCGEIXCAYXAACXXTGC

SEQ ID NO: 3880 - protein, 20 aa, Artificial Sequence
  Synthetically generated peptide
  VARIANT (1)...(20): Xaa = Any Amino Acid
PGTCGEIXCAYXAACXTXGC

SEQ ID NO: 3881 - protein, 20 aa, Artificial Sequence
  Synthetically generated peptide
  VARIANT (1)...(20): Xaa = Any Amino Acid
PGTCGEIXCAYXAACXTGXC

SEQ ID NO: 3882 - protein, 20 aa, Artificial Sequence
  Synthetically generated peptide
  VARIANT (1)...(20): Xaa = Any Amino Acid
PGTCGEIXCAYXAACXTGCX

SEQ ID NO: 3883 - protein, 19 aa, Artificial Sequence
  Synthetically generated peptide
  VARIANT (1)...(19): Xaa = Any Amino Acid
PGTCGEIXCAYXAACTXGC

SEQ ID NO: 3884 - protein, 20 aa, Artificial Sequence
  Synthetically generated peptide
  VARIANT (1)...(20): Xaa = Any Amino Acid
PGTCGEIXCAYXAACTXXGC

SEQ ID NO: 3885 - protein, 20 aa, Artificial Sequence
  Synthetically generated peptide
  VARIANT (1)...(20): Xaa = Any Amino Acid
PGTCGEIXCAYXAACTXGXC

SEQ ID NO: 3886 - protein, 20 aa, Artificial Sequence
  Synthetically generated peptide
  VARIANT (1)...(20): Xaa = Any Amino Acid
PGTCGEIXCAYXAACTXGCX

SEQ ID NO: 3887 - protein, 19 aa, Artificial Sequence
  Synthetically generated peptide
  VARIANT (1)...(19): Xaa = Any Amino Acid
PGTCGEIXCAYXAACTGXC

SEQ ID NO: 3888 - protein, 20 aa, Artificial Sequence
  Synthetically generated peptide
  VARIANT (1)...(20): Xaa = Any Amino Acid
PGTCGEIXCAYXAACTGXXC

SEQ ID NO: 3889 - protein, 20 aa, Artificial Sequence
  Synthetically generated peptide
  VARIANT (1)...(20): Xaa = Any Amino Acid
PGTCGEIXCAYXAACTGXCX

SEQ ID NO: 3890 - protein, 19 aa, Artificial Sequence
  Synthetically generated peptide
  VARIANT (1)...(19): Xaa = Any Amino Acid
PGTCGEIXCAYXAACTGCX

SEQ ID NO: 3891 - protein, 20 aa, Artificial Sequence
  Synthetically generated peptide
  VARIANT (1)...(20): Xaa = Any Amino Acid
PGTCGEIXCAYXAACTGCXX

SEQ ID NO: 3892 - protein, 18 aa, Artificial Sequence
  Synthetically generated peptide
  VARIANT (1)...(18): Xaa = Any Amino Acid
PGTCGEIXCAYAXACTGC

SEQ ID NO: 3893 - protein, 19 aa, Artificial Sequence
  Synthetically generated peptide
  VARIANT (1)...(19): Xaa = Any Amino Acid
PGTCGEIXCAYAXXACTGC

SEQ ID NO: 3894 - protein, 20 aa, Artificial Sequence
  Synthetically generated peptide
  VARIANT (1)...(20): Xaa = Any Amino Acid
PGTCGEIXCAYAXXXACTGC

SEQ ID NO: 3895 - protein, 20 aa, Artificial Sequence
  Synthetically generated peptide
  VARIANT (1)...(20): Xaa = Any Amino Acid
PGTCGEIXCAYAXXAXCTGC

SEQ ID NO: 3896 - protein, 20 aa, Artificial Sequence
  Synthetically generated peptide
  VARIANT (1)...(20): Xaa = Any Amino Acid
PGTCGEIXCAYAXXACXTGC

SEQ ID NO: 3897 - protein, 20 aa, Artificial Sequence
  Synthetically generated peptide
  VARIANT (1)...(20): Xaa = Any Amino Acid
PGTCGEIXCAYAXXACTXGC

SEQ ID NO: 3898 - protein, 20 aa, Artificial Sequence
  Synthetically generated peptide
  VARIANT (1)...(20): Xaa = Any Amino Acid
PGTCGEIXCAYAXXACTGXC

SEQ ID NO: 3899 - protein, 20 aa, Artificial Sequence
  Synthetically generated peptide
  VARIANT (1)...(20): Xaa = Any Amino Acid
PGTCGEIXCAYAXXACTGCX

SEQ ID NO: 3900 - protein, 19 aa, Artificial Sequence
  Synthetically generated peptide
  VARIANT (1)...(19): Xaa = Any Amino Acid
PGTCGEIXCAYAXAXCTGC

SEQ ID NO: 3901 - protein, 20 aa, Artificial Sequence
  Synthetically generated peptide
  VARIANT (1)...(20): Xaa = Any Amino Acid
PGTCGEIXCAYAXAXXCTGC

SEQ ID NO: 3902 - protein, 20 aa, Artificial Sequence
  Synthetically generated peptide
  VARIANT (1)...(20): Xaa = Any Amino Acid
PGTCGEIXCAYAXAXCXTGC

SEQ ID NO: 3903 - protein, 20 aa, Artificial Sequence
  Synthetically generated peptide
  VARIANT (1)...(20): Xaa = Any Amino Acid
PGTCGEIXCAYAXAXCTXGC

SEQ ID NO: 3904 - protein, 20 aa, Artificial Sequence
  Synthetically generated peptide
  VARIANT (1)...(20): Xaa = Any Amino Acid
PGTCGEIXCAYAXAXCTGXC

SEQ ID NO: 3905 - protein, 20 aa, Artificial Sequence
  Synthetically generated peptide
  VARIANT (1)...(20): Xaa = Any Amino Acid
PGTCGEIXCAYAXAXCTGCX

SEQ ID NO: 3906 - protein, 19 aa, Artificial Sequence
  Synthetically generated peptide
  VARIANT (1)...(19): Xaa = Any Amino Acid
PGTCGEIXCAYAXACXTGC

SEQ ID NO: 3907 - protein, 20 aa, Artificial Sequence
  Synthetically generated peptide
  VARIANT (1)...(20): Xaa = Any Amino Acid
PGTCGEIXCAYAXACXXTGC

SEQ ID NO: 3908 - protein, 20 aa, Artificial Sequence
  Synthetically generated peptide
  VARIANT (1)...(20): Xaa = Any Amino Acid
PGTCGEIXCAYAXACXTXGC

SEQ ID NO: 3909 - protein, 20 aa, Artificial Sequence
  Synthetically generated peptide
  VARIANT (1)...(20): Xaa = Any Amino Acid
PGTCGEIXCAYAXACXTGXC

SEQ ID NO: 3910 - protein, 20 aa, Artificial Sequence
  Synthetically generated peptide
  VARIANT (1)...(20): Xaa = Any Amino Acid
PGTCGEIXCAYAXACXTGCX

SEQ ID NO: 3911 - protein, 19 aa, Artificial Sequence
  Synthetically generated peptide
  VARIANT (1)...(19): Xaa = Any Amino Acid
PGTCGEIXCAYAXACTXGC

SEQ ID NO: 3912 - protein, 20 aa, Artificial Sequence
  Synthetically generated peptide
  VARIANT (1)...(20): Xaa = Any Amino Acid
PGTCGEIXCAYAXACTXXGC

SEQ ID NO: 3913 - protein, 20 aa, Artificial Sequence
  Synthetically generated peptide
  VARIANT (1)...(20): Xaa = Any Amino Acid
PGTCGEIXCAYAXACTXGXC

SEQ ID NO: 3914 - protein, 20 aa, Artificial Sequence
  Synthetically generated peptide
  VARIANT (1)...(20): Xaa = Any Amino Acid
PGTCGEIXCAYAXACTXGCX

SEQ ID NO: 3915 - protein, 19 aa, Artificial Sequence
  Synthetically generated peptide
  VARIANT (1)...(19): Xaa = Any Amino Acid
PGTCGEIXCAYAXACTGXC

SEQ ID NO: 3916 - protein, 20 aa, Artificial Sequence
  Synthetically generated peptide
  VARIANT (1)...(20): Xaa = Any Amino Acid
PGTCGEIXCAYAXACTGXXC

SEQ ID NO: 3917 - protein, 20 aa, Artificial Sequence
  Synthetically generated peptide
  VARIANT (1)...(20): Xaa = Any Amino Acid
PGTCGEIXCAYAXACTGXCX

SEQ ID NO: 3918 - protein, 19 aa, Artificial Sequence
  Synthetically generated peptide
  VARIANT (1)...(19): Xaa = Any Amino Acid
PGTCGEIXCAYAXACTGCX

SEQ ID NO: 3919 - protein, 20 aa, Artificial Sequence
  Synthetically generated peptide
  VARIANT (1)...(20): Xaa = Any Amino Acid
PGTCGEIXCAYAXACTGCXX

SEQ ID NO: 3920 - protein, 18 aa, Artificial Sequence
  Synthetically generated peptide
  VARIANT (1)...(18): Xaa = Any Amino Acid
PGTCGEIXCAYAAXCTGC

SEQ ID NO: 3921 - protein, 19 aa, Artificial Sequence
  Synthetically generated peptide
  VARIANT (1)...(19): Xaa = Any Amino Acid
PGTCGEIXCAYAAXXCTGC

SEQ ID NO: 3922 - protein, 20 aa, Artificial Sequence
  Synthetically generated peptide
  VARIANT (1)...(20): Xaa = Any Amino Acid
PGTCGEIXCAYAAXXXCTGC

SEQ ID NO: 3923 - protein, 20 aa, Artificial Sequence
  Synthetically generated peptide
  VARIANT (1)...(20): Xaa = Any Amino Acid
PGTCGEIXCAYAAXXCXTGC

SEQ ID NO: 3924 - protein, 20 aa, Artificial Sequence
  Synthetically generated peptide
  VARIANT (1)...(20): Xaa = Any Amino Acid
PGTCGEIXCAYAAXXCTXGC

SEQ ID NO: 3925 - protein, 20 aa, Artificial Sequence
  Synthetically generated peptide
  VARIANT (1)...(20): Xaa = Any Amino Acid
PGTCGEIXCAYAAXXCTGXC

SEQ ID NO: 3926 - protein, 20 aa, Artificial Sequence
  Synthetically generated peptide
  VARIANT (1)...(20): Xaa = Any Amino Acid
PGTCGEIXCAYAAXXCTGCX

SEQ ID NO: 3927 - protein, 19 aa, Artificial Sequence
  Synthetically generated peptide
  VARIANT (1)...(19): Xaa = Any Amino Acid
PGTCGEIXCAYAAXCXTGC

SEQ ID NO: 3928 - protein, 20 aa, Artificial Sequence
  Synthetically generated peptide
  VARIANT (1)...(20): Xaa = Any Amino Acid
PGTCGEIXCAYAAXCXXTGC

SEQ ID NO: 3929 - protein, 20 aa, Artificial Sequence
  Synthetically generated peptide
  VARIANT (1)...(20): Xaa = Any Amino Acid
PGTCGEIXCAYAAXCXTXGC

SEQ ID NO: 3930 - protein, 20 aa, Artificial Sequence
  Synthetically generated peptide
  VARIANT (1)...(20): Xaa = Any Amino Acid
PGTCGEIXCAYAAXCXTGXC

SEQ ID NO: 3931 - protein, 20 aa, Artificial Sequence
  Synthetically generated peptide
  VARIANT (1)...(20): Xaa = Any Amino Acid
PGTCGEIXCAYAAXCXTGCX

SEQ ID NO: 3932 - protein, 19 aa, Artificial Sequence
  Synthetically generated peptide
  VARIANT (1)...(19): Xaa = Any Amino Acid
PGTCGEIXCAYAAXCTXGC

SEQ ID NO: 3933 - protein, 20 aa, Artificial Sequence
  Synthetically generated peptide
  VARIANT (1)...(20): Xaa = Any Amino Acid
PGTCGEIXCAYAAXCTXXGC

SEQ ID NO: 3934 - protein, 20 aa, Artificial Sequence
  Synthetically generated peptide
  VARIANT (1)...(20): Xaa = Any Amino Acid
PGTCGEIXCAYAAXCTXGXC

SEQ ID NO: 3935 - protein, 20 aa, Artificial Sequence
  Synthetically generated peptide
  VARIANT (1)...(20): Xaa = Any Amino Acid
PGTCGEIXCAYAAXCTXGCX

SEQ ID NO: 3936 - protein, 19 aa, Artificial Sequence
  Synthetically generated peptide
  VARIANT (1)...(19): Xaa = Any Amino Acid
PGTCGEIXCAYAAXCTGXC

SEQ ID NO: 3937 - protein, 20 aa, Artificial Sequence
  Synthetically generated peptide
  VARIANT (1)...(20): Xaa = Any Amino Acid
PGTCGEIXCAYAAXCTGXXC

SEQ ID NO: 3938 - protein, 20 aa, Artificial Sequence
  Synthetically generated peptide
  VARIANT (1)...(20): Xaa = Any Amino Acid
PGTCGEIXCAYAAXCTGXCX

SEQ ID NO: 3939 - protein, 19 aa, Artificial Sequence
  Synthetically generated peptide
  VARIANT (1)...(19): Xaa = Any Amino Acid
PGTCGEIXCAYAAXCTGCX

SEQ ID NO: 3940 - protein, 20 aa, Artificial Sequence
  Synthetically generated peptide
  VARIANT (1)...(20): Xaa = Any Amino Acid
PGTCGEIXCAYAAXCTGCXX

SEQ ID NO: 3941 - protein, 18 aa, Artificial Sequence
  Synthetically generated peptide
  VARIANT (1)...(18): Xaa = Any Amino Acid
PGTCGEIXCAYAACXTGC

SEQ ID NO: 3942 - protein, 19 aa, Artificial Sequence
  Synthetically generated peptide
  VARIANT (1)...(19): Xaa = Any Amino Acid
PGTCGEIXCAYAACXXTGC

SEQ ID NO: 3943 - protein, 20 aa, Artificial Sequence
  Synthetically generated peptide
  VARIANT (1)...(20): Xaa = Any Amino Acid
PGTCGEIXCAYAACXXXTGC

SEQ ID NO: 3944 - protein, 20 aa, Artificial Sequence
  Synthetically generated peptide
  VARIANT (1)...(20): Xaa = Any Amino Acid
PGTCGEIXCAYAACXXTXGC

SEQ ID NO: 3945 - protein, 20 aa, Artificial Sequence
  Synthetically generated peptide
  VARIANT (1)...(20): Xaa = Any Amino Acid
PGTCGEIXCAYAACXXTGXC

SEQ ID NO: 3946 - protein, 20 aa, Artificial Sequence
  Synthetically generated peptide
  VARIANT (1)...(20): Xaa = Any Amino Acid
PGTCGEIXCAYAACXXTGCX

SEQ ID NO: 3947 - protein, 19 aa, Artificial Sequence
  Synthetically generated peptide
  VARIANT (1)...(19): Xaa = Any Amino Acid
PGTCGEIXCAYAACXTXGC

SEQ ID NO: 3948 - protein, 20 aa, Artificial Sequence
  Synthetically generated peptide
  VARIANT (1)...(20): Xaa = Any Amino Acid
PGTCGEIXCAYAACXTXXGC

SEQ ID NO: 3949 - protein, 20 aa, Artificial Sequence
  Synthetically generated peptide
  VARIANT (1)...(20): Xaa = Any Amino Acid
PGTCGEIXCAYAACXTXGXC

SEQ ID NO: 3950 - protein, 20 aa, Artificial Sequence
  Synthetically generated peptide
  VARIANT (1)...(20): Xaa = Any Amino Acid
PGTCGEIXCAYAACXTXGCX

SEQ ID NO: 3951 - protein, 19 aa, Artificial Sequence
  Synthetically generated peptide
  VARIANT (1)...(19): Xaa = Any Amino Acid
PGTCGEIXCAYAACXTGXC

SEQ ID NO: 3952 - protein, 20 aa, Artificial Sequence
  Synthetically generated peptide
  VARIANT (1)...(20): Xaa = Any Amino Acid
PGTCGEIXCAYAACXTGXXC

SEQ ID NO: 3953 - protein, 20 aa, Artificial Sequence
  Synthetically generated peptide
  VARIANT (1)...(20): Xaa = Any Amino Acid
PGTCGEIXCAYAACXTGXCX

SEQ ID NO: 3954 - protein, 19 aa, Artificial Sequence
  Synthetically generated peptide
  VARIANT (1)...(19): Xaa = Any Amino Acid
PGTCGEIXCAYAACXTGCX

SEQ ID NO: 3955 - protein, 20 aa, Artificial Sequence
  Synthetically generated peptide
  VARIANT (1)...(20): Xaa = Any Amino Acid
PGTCGEIXCAYAACXTGCXX

SEQ ID NO: 3956 - protein, 18 aa, Artificial Sequence
  Synthetically generated peptide
  VARIANT (1)...(18): Xaa = Any Amino Acid
PGTCGEIXCAYAACTXGC

SEQ ID NO: 3957 - protein, 19 aa, Artificial Sequence
  Synthetically generated peptide
  VARIANT (1)...(19): Xaa = Any Amino Acid
PGTCGEIXCAYAACTXXGC

SEQ ID NO: 3958 - protein, 20 aa, Artificial Sequence
  Synthetically generated peptide
  VARIANT (1)...(20): Xaa = Any Amino Acid
PGTCGEIXCAYAACTXXXGC

SEQ ID NO: 3959 - protein, 20 aa, Artificial Sequence
  Synthetically generated peptide
  VARIANT (1)...(20): Xaa = Any Amino Acid
PGTCGEIXCAYAACTXXGXC

SEQ ID NO: 3960 - protein, 20 aa, Artificial Sequence
  Synthetically generated peptide
  VARIANT (1)...(20): Xaa = Any Amino Acid
PGTCGEIXCAYAACTXXGCX

SEQ ID NO: 3961 - protein, 19 aa, Artificial Sequence
  Synthetically generated peptide
  VARIANT (1)...(19): Xaa = Any Amino Acid
PGTCGEIXCAYAACTXGXC

SEQ ID NO: 3962 - protein, 20 aa, Artificial Sequence
  Synthetically generated peptide
  VARIANT (1)...(20): Xaa = Any Amino Acid
PGTCGEIXCAYAACTXGXXC

SEQ ID NO: 3963 - protein, 20 aa, Artificial Sequence
  Synthetically generated peptide
  VARIANT (1)...(20): Xaa = Any Amino Acid
PGTCGEIXCAYAACTXGXCX

SEQ ID NO: 3964 - protein, 19 aa, Artificial Sequence
  Synthetically generated peptide
  VARIANT (1)...(19): Xaa = Any Amino Acid
PGTCGEIXCAYAACTXGCX

SEQ ID NO: 3965 - protein, 20 aa, Artificial Sequence
  Synthetically generated peptide
  VARIANT (1)...(20): Xaa = Any Amino Acid
PGTCGEIXCAYAACTXGCXX

SEQ ID NO: 3966 - protein, 18 aa, Artificial Sequence
  Synthetically generated peptide
  VARIANT (1)...(18): Xaa = Any Amino Acid
PGTCGEIXCAYAACTGXC

SEQ ID NO: 3967 - protein, 19 aa, Artificial Sequence
  Synthetically generated peptide
  VARIANT (1)...(19): Xaa = Any Amino Acid
PGTCGEIXCAYAACTGXXC

SEQ ID NO: 3968 - protein, 20 aa, Artificial Sequence
  Synthetically generated peptide
  VARIANT (1)...(20): Xaa = Any Amino Acid
PGTCGEIXCAYAACTGXXXC

SEQ ID NO: 3969 - protein, 20 aa, Artificial Sequence
  Synthetically generated peptide
  VARIANT (1)...(20): Xaa = Any Amino Acid
PGTCGEIXCAYAACTGXXCX

SEQ ID NO: 3970 - protein, 19 aa, Artificial Sequence
  Synthetically generated peptide
  VARIANT (1)...(19): Xaa = Any Amino Acid
PGTCGEIXCAYAACTGXCX

SEQ ID NO: 3971 - protein, 20 aa, Artificial Sequence
  Synthetically generated peptide
  VARIANT (1)...(20): Xaa = Any Amino Acid
PGTCGEIXCAYAACTGXCXX

SEQ ID NO: 3972 - protein, 18 aa, Artificial Sequence
  Synthetically generated peptide
  VARIANT (1)...(18): Xaa = Any Amino Acid
PGTCGEIXCAYAACTGCX

SEQ ID NO: 3973 - protein, 19 aa, Artificial Sequence
  Synthetically generated peptide
  VARIANT (1)...(19): Xaa = Any Amino Acid
PGTCGEIXCAYAACTGCXX

SEQ ID NO: 3974 - protein, 20 aa, Artificial Sequence
  Synthetically generated peptide
  VARIANT (1)...(20): Xaa = Any Amino Acid
PGTCGEIXCAYAACTGCXXX

SEQ ID NO: 3975 - protein, 17 aa, Artificial Sequence
  Synthetically generated peptide
  VARIANT (1)...(17): Xaa = Any Amino Acid
PGTCGEICXAYAACTGC

SEQ ID NO: 3976 - protein, 18 aa, Artificial Sequence
  Synthetically generated peptide
  VARIANT (1)...(18): Xaa = Any Amino Acid
PGTCGEICXXAYAACTGC

SEQ ID NO: 3977 - protein, 19 aa, Artificial Sequence
  Synthetically generated peptide
  VARIANT (1)...(19): Xaa = Any Amino Acid
PGTCGEICXXXAYAACTGC

SEQ ID NO: 3978 - protein, 20 aa, Artificial Sequence
  Synthetically generated peptide
  VARIANT (1)...(20): Xaa = Any Amino Acid
PGTCGEICXXXXAYAACTGC

SEQ ID NO: 3979 - protein, 20 aa, Artificial Sequence
  Synthetically generated peptide
  VARIANT (1)...(20): Xaa = Any Amino Acid
PGTCGEICXXXAXYAACTGC

SEQ ID NO: 3980 - protein, 20 aa, Artificial Sequence
  Synthetically generated peptide
  VARIANT (1)...(20): Xaa = Any Amino Acid
PGTCGEICXXXAYXAACTGC

SEQ ID NO: 3981 - protein, 20 aa, Artificial Sequence
  Synthetically generated peptide
  VARIANT (1)...(20): Xaa = Any Amino Acid
PGTCGEICXXXAYAXACTGC

SEQ ID NO: 3982 - protein, 20 aa, Artificial Sequence
  Synthetically generated peptide
  VARIANT (1)...(20): Xaa = Any Amino Acid
PGTCGEICXXXAYAAXCTGC

SEQ ID NO: 3983 - protein, 20 aa, Artificial Sequence
  Synthetically generated peptide
  VARIANT (1)...(20): Xaa = Any Amino Acid
PGTCGEICXXXAYAACXTGC

SEQ ID NO: 3984 - protein, 20 aa, Artificial Sequence
  Synthetically generated peptide
  VARIANT (1)...(20): Xaa = Any Amino Acid
PGTCGEICXXXAYAACTXGC

SEQ ID NO: 3985 - protein, 20 aa, Artificial Sequence
  Synthetically generated peptide
  VARIANT (1)...(20): Xaa = Any Amino Acid
PGTCGEICXXXAYAACTGXC

SEQ ID NO: 3986 - protein, 20 aa, Artificial Sequence
  Synthetically generated peptide
  VARIANT (1)...(20): Xaa = Any Amino Acid
PGTCGEICXXXAYAACTGCX

SEQ ID NO: 3987 - protein, 19 aa, Artificial Sequence
  Synthetically generated peptide
  VARIANT (1)...(19): Xaa = Any Amino Acid
PGTCGEICXXAXYAACTGC

SEQ ID NO: 3988 - protein, 20 aa, Artificial Sequence
  Synthetically generated peptide
  VARIANT (1)...(20): Xaa = Any Amino Acid
PGTCGEICXXAXXYAACTGC

SEQ ID NO: 3989 - protein, 20 aa, Artificial Sequence
  Synthetically generated peptide
  VARIANT (1)...(20): Xaa = Any Amino Acid
PGTCGEICXXAXYXAACTGC

SEQ ID NO: 3990 - protein, 20 aa, Artificial Sequence
  Synthetically generated peptide
  VARIANT (1)...(20): Xaa = Any Amino Acid
PGTCGEICXXAXYAXACTGC

SEQ ID NO: 3991 - protein, 20 aa, Artificial Sequence
  Synthetically generated peptide
  VARIANT (1)...(20): Xaa = Any Amino Acid
PGTCGEICXXAXYAAXCTGC

SEQ ID NO: 3992 - protein, 20 aa, Artificial Sequence
  Synthetically generated peptide
  VARIANT (1)...(20): Xaa = Any Amino Acid
PGTCGEICXXAXYAACXTGC

SEQ ID NO: 3993 - protein, 20 aa, Artificial Sequence
  Synthetically generated peptide
  VARIANT (1)...(20): Xaa = Any Amino Acid
PGTCGEICXXAXYAACTXGC

SEQ ID NO: 3994 - protein, 20 aa, Artificial Sequence
  Synthetically generated peptide
  VARIANT (1)...(20): Xaa = Any Amino Acid
PGTCGEICXXAXYAACTGXC

SEQ ID NO: 3995 - protein, 20 aa, Artificial Sequence
  Synthetically generated peptide
  VARIANT (1)...(20): Xaa = Any Amino Acid
PGTCGEICXXAXYAACTGCX

SEQ ID NO: 3996 - protein, 19 aa, Artificial Sequence
  Synthetically generated peptide
  VARIANT (1)...(19): Xaa = Any Amino Acid
PGTCGEICXXAYXAACTGC

SEQ ID NO: 3997 - protein, 20 aa, Artificial Sequence
  Synthetically generated peptide
  VARIANT (1)...(20): Xaa = Any Amino Acid
PGTCGEICXXAYXXAACTGC

SEQ ID NO: 3998 - protein, 20 aa, Artificial Sequence
  Synthetically generated peptide
  VARIANT (1)...(20): Xaa = Any Amino Acid
PGTCGEICXXAYXAXACTGC

SEQ ID NO: 3999 - protein, 20 aa, Artificial Sequence
  Synthetically generated peptide
  VARIANT (1)...(20): Xaa = Any Amino Acid
PGTCGEICXXAYXAAXCTGC

SEQ ID NO: 4000 - protein, 20 aa, Artificial Sequence
  Synthetically generated peptide
  VARIANT (1)...(20): Xaa = Any Amino Acid
PGTCGEICXXAYXAACXTGC

SEQ ID NO: 4001 - protein, 20 aa, Artificial Sequence
  Synthetically generated peptide
  VARIANT (1)...(20): Xaa = Any Amino Acid
PGTCGEICXXAYXAACTXGC

SEQ ID NO: 4002 - protein, 20 aa, Artificial Sequence
  Synthetically generated peptide
  VARIANT (1)...(20): Xaa = Any Amino Acid
PGTCGEICXXAYXAACTGXC

SEQ ID NO: 4003 - protein, 20 aa, Artificial Sequence
  Synthetically generated peptide
  VARIANT (1)...(20): Xaa = Any Amino Acid
PGTCGEICXXAYXAACTGCX

SEQ ID NO: 4004 - protein, 19 aa, Artificial Sequence
  Synthetically generated peptide
  VARIANT (1)...(19): Xaa = Any Amino Acid
PGTCGEICXXAYAXACTGC

SEQ ID NO: 4005 - protein, 20 aa, Artificial Sequence
  Synthetically generated peptide
  VARIANT (1)...(20): Xaa = Any Amino Acid
PGTCGEICXXAYAXXACTGC

SEQ ID NO: 4006 - protein, 20 aa, Artificial Sequence
  Synthetically generated peptide
  VARIANT (1)...(20): Xaa = Any Amino Acid
PGTCGEICXXAYAXAXCTGC

SEQ ID NO: 4007 - protein, 20 aa, Artificial Sequence
  Synthetically generated peptide
  VARIANT (1)...(20): Xaa = Any Amino Acid
PGTCGEICXXAYAXACXTGC

SEQ ID NO: 4008 - protein, 20 aa, Artificial Sequence
  Synthetically generated peptide
  VARIANT (1)...(20): Xaa = Any Amino Acid
PGTCGEICXXAYAXACTXGC

SEQ ID NO: 4009 - protein, 20 aa, Artificial Sequence
  Synthetically generated peptide
  VARIANT (1)...(20): Xaa = Any Amino Acid
PGTCGEICXXAYAXACTGXC

SEQ ID NO: 4010 - protein, 20 aa, Artificial Sequence
  Synthetically generated peptide
  VARIANT (1)...(20): Xaa = Any Amino Acid
PGTCGEICXXAYAXACTGCX

SEQ ID NO: 4011 - protein, 19 aa, Artificial Sequence
  Synthetically generated peptide
  VARIANT (1)...(19): Xaa = Any Amino Acid
PGTCGEICXXAYAAXCTGC

SEQ ID NO: 4012 - protein, 20 aa, Artificial Sequence
  Synthetically generated peptide
  VARIANT (1)...(20): Xaa = Any Amino Acid
PGTCGEICXXAYAAXXCTGC

SEQ ID NO: 4013 - protein, 20 aa, Artificial Sequence
  Synthetically generated peptide
  VARIANT (1)...(20): Xaa = Any Amino Acid
PGTCGEICXXAYAAXCXTGC

SEQ ID NO: 4014 - protein, 20 aa, Artificial Sequence
  Synthetically generated peptide
  VARIANT (1)...(20): Xaa = Any Amino Acid
PGTCGEICXXAYAAXCTXGC

SEQ ID NO: 4015 - protein, 20 aa, Artificial Sequence
  Synthetically generated peptide
  VARIANT (1)...(20): Xaa = Any Amino Acid
PGTCGEICXXAYAAXCTGXC

SEQ ID NO: 4016 - protein, 20 aa, Artificial Sequence
  Synthetically generated peptide
  VARIANT (1)...(20): Xaa = Any Amino Acid
PGTCGEICXXAYAAXCTGCX

SEQ ID NO: 4017 - protein, 19 aa, Artificial Sequence
  Synthetically generated peptide
  VARIANT (1)...(19): Xaa = Any Amino Acid
PGTCGEICXXAYAACXTGC

SEQ ID NO: 4018 - protein, 20 aa, Artificial Sequence
  Synthetically generated peptide
  VARIANT (1)...(20): Xaa = Any Amino Acid
PGTCGEICXXAYAACXXTGC

SEQ ID NO: 4019 - protein, 20 aa, Artificial Sequence
  Synthetically generated peptide
  VARIANT (1)...(20): Xaa = Any Amino Acid
PGTCGEICXXAYAACXTXGC

SEQ ID NO: 4020 - protein, 20 aa, Artificial Sequence
  Synthetically generated peptide
  VARIANT (1)...(20): Xaa = Any Amino Acid
PGTCGEICXXAYAACXTGXC

SEQ ID NO: 4021 - protein, 20 aa, Artificial Sequence
  Synthetically generated peptide
  VARIANT (1)...(20): Xaa = Any Amino Acid
PGTCGEICXXAYAACXTGCX

SEQ ID NO: 4022 - protein, 19 aa, Artificial Sequence
  Synthetically generated peptide
  VARIANT (1)...(19): Xaa = Any Amino Acid
PGTCGEICXXAYAACTXGC

SEQ ID NO: 4023 - protein, 20 aa, Artificial Sequence
  Synthetically generated peptide
  VARIANT (1)...(20): Xaa = Any Amino Acid
PGTCGEICXXAYAACTXXGC

SEQ ID NO: 4024 - protein, 20 aa, Artificial Sequence
  Synthetically generated peptide
  VARIANT (1)...(20): Xaa = Any Amino Acid
PGTCGEICXXAYAACTXGXC

SEQ ID NO: 4025 - protein, 20 aa, Artificial Sequence
  Synthetically generated peptide
  VARIANT (1)...(20): Xaa = Any Amino Acid
PGTCGEICXXAYAACTXGCX

SEQ ID NO: 4026 - protein, 19 aa, Artificial Sequence
  Synthetically generated peptide
  VARIANT (1)...(19): Xaa = Any Amino Acid
PGTCGEICXXAYAACTGXC

SEQ ID NO: 4027 - protein, 20 aa, Artificial Sequence
  Synthetically generated peptide
  VARIANT (1)...(20): Xaa = Any Amino Acid
PGTCGEICXXAYAACTGXXC

SEQ ID NO: 4028 - protein, 20 aa, Artificial Sequence
  Synthetically generated peptide
  VARIANT (1)...(20): Xaa = Any Amino Acid
PGTCGEICXXAYAACTGXCX

SEQ ID NO: 4029 - protein, 19 aa, Artificial Sequence
  Synthetically generated peptide
  VARIANT (1)...(19): Xaa = Any Amino Acid
PGTCGEICXXAYAACTGCX

SEQ ID NO: 4030 - protein, 20 aa, Artificial Sequence
  Synthetically generated peptide
  VARIANT (1)...(20): Xaa = Any Amino Acid
PGTCGEICXXAYAACTGCXX

SEQ ID NO: 4031 - protein, 18 aa, Artificial Sequence
  Synthetically generated peptide
  VARIANT (1)...(18): Xaa = Any Amino Acid
PGTCGEICXAXYAACTGC

SEQ ID NO: 4032 - protein, 19 aa, Artificial Sequence
  Synthetically generated peptide
  VARIANT (1)...(19): Xaa = Any Amino Acid
PGTCGEICXAXXYAACTGC

SEQ ID NO: 4033 - protein, 20 aa, Artificial Sequence
  Synthetically generated peptide
  VARIANT (1)...(20): Xaa = Any Amino Acid
PGTCGEICXAXXXYAACTGC

SEQ ID NO: 4034 - protein, 20 aa, Artificial Sequence
  Synthetically generated peptide
  VARIANT (1)...(20): Xaa = Any Amino Acid
PGTCGEICXAXXYXAACTGC

SEQ ID NO: 4035 - protein, 20 aa, Artificial Sequence
  Synthetically generated peptide
  VARIANT (1)...(20): Xaa = Any Amino Acid
PGTCGEICXAXXYAXACTGC

SEQ ID NO: 4036 - protein, 20 aa, Artificial Sequence
  Synthetically generated peptide
  VARIANT (1)...(20): Xaa = Any Amino Acid
PGTCGEICXAXXYAAXCTGC

SEQ ID NO: 4037 - protein, 20 aa, Artificial Sequence
  Synthetically generated peptide
  VARIANT (1)...(20): Xaa = Any Amino Acid
PGTCGEICXAXXYAACXTGC

SEQ ID NO: 4038 - protein, 20 aa, Artificial Sequence
  Synthetically generated peptide
  VARIANT (1)...(20): Xaa = Any Amino Acid
PGTCGEICXAXXYAACTXGC

SEQ ID NO: 4039 - protein, 20 aa, Artificial Sequence
  Synthetically generated peptide
  VARIANT (1)...(20): Xaa = Any Amino Acid
PGTCGEICXAXXYAACTGXC

SEQ ID NO: 4040 - protein, 20 aa, Artificial Sequence
  Synthetically generated peptide
  VARIANT (1)...(20): Xaa = Any Amino Acid
PGTCGEICXAXXYAACTGCX

SEQ ID NO: 4041 - protein, 19 aa, Artificial Sequence
  Synthetically generated peptide
  VARIANT (1)...(19): Xaa = Any Amino Acid
PGTCGEICXAXYXAACTGC

SEQ ID NO: 4042 - protein, 20 aa, Artificial Sequence
  Synthetically generated peptide
  VARIANT (1)...(20): Xaa = Any Amino Acid
PGTCGEICXAXYXXAACTGC

SEQ ID NO: 4043 - protein, 20 aa, Artificial Sequence
  Synthetically generated peptide
  VARIANT (1)...(20): Xaa = Any Amino Acid
PGTCGEICXAXYXAXACTGC

SEQ ID NO: 4044 - protein, 20 aa, Artificial Sequence
  Synthetically generated peptide
  VARIANT (1)...(20): Xaa = Any Amino Acid
PGTCGEICXAXYXAAXCTGC

SEQ ID NO: 4045 - protein, 20 aa, Artificial Sequence
  Synthetically generated peptide
  VARIANT (1)...(20): Xaa = Any Amino Acid
PGTCGEICXAXYXAACXTGC

SEQ ID NO: 4046 - protein, 20 aa, Artificial Sequence
  Synthetically generated peptide
  VARIANT (1)...(20): Xaa = Any Amino Acid
PGTCGEICXAXYXAACTXGC

SEQ ID NO: 4047 - protein, 20 aa, Artificial Sequence
  Synthetically generated peptide
  VARIANT (1)...(20): Xaa = Any Amino Acid
PGTCGEICXAXYXAACTGXC

SEQ ID NO: 4048 - protein, 20 aa, Artificial Sequence
  Synthetically generated peptide
  VARIANT (1)...(20): Xaa = Any Amino Acid
PGTCGEICXAXYXAACTGCX

SEQ ID NO: 4049 - protein, 19 aa, Artificial Sequence
  Synthetically generated peptide
  VARIANT (1)...(19): Xaa = Any Amino Acid
PGTCGEICXAXYAXACTGC

SEQ ID NO: 4050 - protein, 20 aa, Artificial Sequence
  Synthetically generated peptide
  VARIANT (1)...(20): Xaa = Any Amino Acid
PGTCGEICXAXYAXXACTGC

SEQ ID NO: 4051 - protein, 20 aa, Artificial Sequence
  Synthetically generated peptide
  VARIANT (1)...(20): Xaa = Any Amino Acid
PGTCGEICXAXYAXAXCTGC

SEQ ID NO: 4052 - protein, 20 aa, Artificial Sequence
  Synthetically generated peptide
  VARIANT (1)...(20): Xaa = Any Amino Acid
PGTCGEICXAXYAXACXTGC

SEQ ID NO: 4053 - protein, 20 aa, Artificial Sequence
  Synthetically generated peptide
  VARIANT (1)...(20): Xaa = Any Amino Acid
PGTCGEICXAXYAXACTXGC

SEQ ID NO: 4054 - protein, 20 aa, Artificial Sequence
  Synthetically generated peptide
  VARIANT (1)...(20): Xaa = Any Amino Acid
PGTCGEICXAXYAXACTGXC

SEQ ID NO: 4055 - protein, 20 aa, Artificial Sequence
  Synthetically generated peptide
  VARIANT (1)...(20): Xaa = Any Amino Acid
PGTCGEICXAXYAXACTGCX

SEQ ID NO: 4056 - protein, 19 aa, Artificial Sequence
  Synthetically generated peptide
  VARIANT (1)...(19): Xaa = Any Amino Acid
PGTCGEICXAXYAAXCTGC

SEQ ID NO: 4057 - protein, 20 aa, Artificial Sequence
  Synthetically generated peptide
  VARIANT (1)...(20): Xaa = Any Amino Acid
PGTCGEICXAXYAAXXCTGC

SEQ ID NO: 4058 - protein, 20 aa, Artificial Sequence
  Synthetically generated peptide
  VARIANT (1)...(20): Xaa = Any Amino Acid
PGTCGEICXAXYAAXCXTGC

SEQ ID NO: 4059 - protein, 20 aa, Artificial Sequence
  Synthetically generated peptide
  VARIANT (1)...(20): Xaa = Any Amino Acid
PGTCGEICXAXYAAXCTXGC

SEQ ID NO: 4060 - protein, 20 aa, Artificial Sequence
  Synthetically generated peptide
  VARIANT (1)...(20): Xaa = Any Amino Acid
PGTCGEICXAXYAAXCTGXC

SEQ ID NO: 4061 - protein, 20 aa, Artificial Sequence
  Synthetically generated peptide
  VARIANT (1)...(20): Xaa = Any Amino Acid
PGTCGEICXAXYAAXCTGCX

SEQ ID NO: 4062 - protein, 19 aa, Artificial Sequence
  Synthetically generated peptide
  VARIANT (1)...(19): Xaa = Any Amino Acid
PGTCGEICXAXYAACXTGC

SEQ ID NO: 4063 - protein, 20 aa, Artificial Sequence
  Synthetically generated peptide
  VARIANT (1)...(20): Xaa = Any Amino Acid
PGTCGEICXAXYAACXXTGC

SEQ ID NO: 4064 - protein, 20 aa, Artificial Sequence
  Synthetically generated peptide
  VARIANT (1)...(20): Xaa = Any Amino Acid
PGTCGEICXAXYAACXTXGC

SEQ ID NO: 4065 - protein, 20 aa, Artificial Sequence
  Synthetically generated peptide
  VARIANT (1)...(20): Xaa = Any Amino Acid
PGTCGEICXAXYAACXTGXC

SEQ ID NO: 4066 - protein, 20 aa, Artificial Sequence
  Synthetically generated peptide
  VARIANT (1)...(20): Xaa = Any Amino Acid
PGTCGEICXAXYAACXTGCX

SEQ ID NO: 4067 - protein, 19 aa, Artificial Sequence
  Synthetically generated peptide
  VARIANT (1)...(19): Xaa = Any Amino Acid
PGTCGEICXAXYAACTXGC

SEQ ID NO: 4068 - protein, 20 aa, Artificial Sequence
  Synthetically generated peptide
  VARIANT (1)...(20): Xaa = Any Amino Acid
PGTCGEICXAXYAACTXXGC

SEQ ID NO: 4069 - protein, 20 aa, Artificial Sequence
  Synthetically generated peptide
  VARIANT (1)...(20): Xaa = Any Amino Acid
PGTCGEICXAXYAACTXGXC

SEQ ID NO: 4070 - protein, 20 aa, Artificial Sequence
  Synthetically generated peptide
  VARIANT (1)...(20): Xaa = Any Amino Acid
PGTCGEICXAXYAACTXGCX

SEQ ID NO: 4071 - protein, 19 aa, Artificial Sequence
  Synthetically generated peptide
  VARIANT (1)...(19): Xaa = Any Amino Acid
PGTCGEICXAXYAACTGXC

SEQ ID NO: 4072 - protein, 20 aa, Artificial Sequence
  Synthetically generated peptide
  VARIANT (1)...(20): Xaa = Any Amino Acid
PGTCGEICXAXYAACTGXXC

SEQ ID NO: 4073 - protein, 20 aa, Artificial Sequence
  Synthetically generated peptide
  VARIANT (1)...(20): Xaa = Any Amino Acid
PGTCGEICXAXYAACTGXCX

SEQ ID NO: 4074 - protein, 19 aa, Artificial Sequence
  Synthetically generated peptide
  VARIANT (1)...(19): Xaa = Any Amino Acid
PGTCGEICXAXYAACTGCX

SEQ ID NO: 4075 - protein, 20 aa, Artificial Sequence
  Synthetically generated peptide
  VARIANT (1)...(20): Xaa = Any Amino Acid
PGTCGEICXAXYAACTGCXX

SEQ ID NO: 4076 - protein, 18 aa, Artificial Sequence
  Synthetically generated peptide
  VARIANT (1)...(18): Xaa = Any Amino Acid
PGTCGEICXAYXAACTGC

SEQ ID NO: 4077 - protein, 19 aa, Artificial Sequence
  Synthetically generated peptide
  VARIANT (1)...(19): Xaa = Any Amino Acid
PGTCGEICXAYXXAACTGC

SEQ ID NO: 4078 - protein, 20 aa, Artificial Sequence
  Synthetically generated peptide
  VARIANT (1)...(20): Xaa = Any Amino Acid
PGTCGEICXAYXXXAACTGC

SEQ ID NO: 4079 - protein, 20 aa, Artificial Sequence
  Synthetically generated peptide
  VARIANT (1)...(20): Xaa = Any Amino Acid
PGTCGEICXAYXXAXACTGC

SEQ ID NO: 4080 - protein, 20 aa, Artificial Sequence
  Synthetically generated peptide
  VARIANT (1)...(20): Xaa = Any Amino Acid
PGTCGEICXAYXXAAXCTGC

SEQ ID NO: 4081 - protein, 20 aa, Artificial Sequence
  Synthetically generated peptide
  VARIANT (1)...(20): Xaa = Any Amino Acid
PGTCGEICXAYXXAACXTGC

SEQ ID NO: 4082 - protein, 20 aa, Artificial Sequence
  Synthetically generated peptide
  VARIANT (1)...(20): Xaa = Any Amino Acid
PGTCGEICXAYXXAACTXGC

SEQ ID NO: 4083 - protein, 20 aa, Artificial Sequence
  Synthetically generated peptide
  VARIANT (1)...(20): Xaa = Any Amino Acid
PGTCGEICXAYXXAACTGXC

SEQ ID NO: 4084 - protein, 20 aa, Artificial Sequence
  Synthetically generated peptide
  VARIANT (1)...(20): Xaa = Any Amino Acid
PGTCGEICXAYXXAACTGCX

SEQ ID NO: 4085 - protein, 19 aa, Artificial Sequence
  Synthetically generated peptide
  VARIANT (1)...(19): Xaa = Any Amino Acid
PGTCGEICXAYXAXACTGC

SEQ ID NO: 4086 - protein, 20 aa, Artificial Sequence
  Synthetically generated peptide
  VARIANT (1)...(20): Xaa = Any Amino Acid
PGTCGEICXAYXAXXACTGC

SEQ ID NO: 4087 - protein, 20 aa, Artificial Sequence
  Synthetically generated peptide
  VARIANT (1)...(20): Xaa = Any Amino Acid
PGTCGEICXAYXAXAXCTGC

SEQ ID NO: 4088 - protein, 20 aa, Artificial Sequence
  Synthetically generated peptide
  VARIANT (1)...(20): Xaa = Any Amino Acid
PGTCGEICXAYXAXACXTGC

SEQ ID NO: 4089 - protein, 20 aa, Artificial Sequence
  Synthetically generated peptide
  VARIANT (1)...(20): Xaa = Any Amino Acid
PGTCGEICXAYXAXACTXGC

SEQ ID NO: 4090 - protein, 20 aa, Artificial Sequence
  Synthetically generated peptide
  VARIANT (1)...(20): Xaa = Any Amino Acid
PGTCGEICXAYXAXACTGXC

SEQ ID NO: 4091 - protein, 20 aa, Artificial Sequence
  Synthetically generated peptide
  VARIANT (1)...(20): Xaa = Any Amino Acid
PGTCGEICXAYXAXACTGCX

SEQ ID NO: 4092 - protein, 19 aa, Artificial Sequence
  Synthetically generated peptide
  VARIANT (1)...(19): Xaa = Any Amino Acid
PGTCGEICXAYXAAXCTGC

SEQ ID NO: 4093 - protein, 20 aa, Artificial Sequence
  Synthetically generated peptide
  VARIANT (1)...(20): Xaa = Any Amino Acid
PGTCGEICXAYXAAXXCTGC

SEQ ID NO: 4094 - protein, 20 aa, Artificial Sequence
  Synthetically generated peptide
  VARIANT (1)...(20): Xaa = Any Amino Acid
PGTCGEICXAYXAAXCXTGC

SEQ ID NO: 4095 - protein, 20 aa, Artificial Sequence
  Synthetically generated peptide
  VARIANT (1)...(20): Xaa = Any Amino Acid
PGTCGEICXAYXAAXCTXGC

SEQ ID NO: 4096 - protein, 20 aa, Artificial Sequence
  Synthetically generated peptide
  VARIANT (1)...(20): Xaa = Any Amino Acid
PGTCGEICXAYXAAXCTGXC

SEQ ID NO: 4097 - protein, 20 aa, Artificial Sequence
  Synthetically generated peptide
  VARIANT (1)...(20): Xaa = Any Amino Acid
PGTCGEICXAYXAAXCTGCX

SEQ ID NO: 4098 - protein, 19 aa, Artificial Sequence
  Synthetically generated peptide
  VARIANT (1)...(19): Xaa = Any Amino Acid
PGTCGEICXAYXAACXTGC

SEQ ID NO: 4099 - protein, 20 aa, Artificial Sequence
  Synthetically generated peptide
  VARIANT (1)...(20): Xaa = Any Amino Acid
PGTCGEICXAYXAACXXTGC

SEQ ID NO: 4100 - protein, 20 aa, Artificial Sequence
  Synthetically generated peptide
  VARIANT (1)...(20): Xaa = Any Amino Acid
PGTCGEICXAYXAACXTXGC

SEQ ID NO: 4101 - protein, 20 aa, Artificial Sequence
  Synthetically generated peptide
  VARIANT (1)...(20): Xaa = Any Amino Acid
PGTCGEICXAYXAACXTGXC

SEQ ID NO: 4102 - protein, 20 aa, Artificial Sequence
  Synthetically generated peptide
  VARIANT (1)...(20): Xaa = Any Amino Acid
PGTCGEICXAYXAACXTGCX

SEQ ID NO: 4103 - protein, 19 aa, Artificial Sequence
  Synthetically generated peptide
  VARIANT (1)...(19): Xaa = Any Amino Acid
PGTCGEICXAYXAACTXGC

SEQ ID NO: 4104 - protein, 20 aa, Artificial Sequence
  Synthetically generated peptide
  VARIANT (1)...(20): Xaa = Any Amino Acid
PGTCGEICXAYXAACTXXGC

SEQ ID NO: 4105 - protein, 20 aa, Artificial Sequence
  Synthetically generated peptide
  VARIANT (1)...(20): Xaa = Any Amino Acid
PGTCGEICXAYXAACTXGXC

SEQ ID NO: 4106 - protein, 20 aa, Artificial Sequence
  Synthetically generated peptide
  VARIANT (1)...(20): Xaa = Any Amino Acid
PGTCGEICXAYXAACTXGCX

SEQ ID NO: 4107 - protein, 19 aa, Artificial Sequence
  Synthetically generated peptide
  VARIANT (1)...(19): Xaa = Any Amino Acid
PGTCGEICXAYXAACTGXC

SEQ ID NO: 4108 - protein, 20 aa, Artificial Sequence
  Synthetically generated peptide
  VARIANT (1)...(20): Xaa = Any Amino Acid
PGTCGEICXAYXAACTGXXC

SEQ ID NO: 4109 - protein, 20 aa, Artificial Sequence
  Synthetically generated peptide
  VARIANT (1)...(20): Xaa = Any Amino Acid
PGTCGEICXAYXAACTGXCX

SEQ ID NO: 4110 - protein, 19 aa, Artificial Sequence
  Synthetically generated peptide
  VARIANT (1)...(19): Xaa = Any Amino Acid
PGTCGEICXAYXAACTGCX

SEQ ID NO: 4111 - protein, 20 aa, Artificial Sequence
  Synthetically generated peptide
  VARIANT (1)...(20): Xaa = Any Amino Acid
PGTCGEICXAYXAACTGCXX

SEQ ID NO: 4112 - protein, 18 aa, Artificial Sequence
  Synthetically generated peptide
  VARIANT (1)...(18): Xaa = Any Amino Acid
PGTCGEICXAYAXACTGC

SEQ ID NO: 4113 - protein, 19 aa, Artificial Sequence
  Synthetically generated peptide
  VARIANT (1)...(19): Xaa = Any Amino Acid
PGTCGEICXAYAXXACTGC

SEQ ID NO: 4114 - protein, 20 aa, Artificial Sequence
  Synthetically generated peptide
  VARIANT (1)...(20): Xaa = Any Amino Acid
PGTCGEICXAYAXXXACTGC

SEQ ID NO: 4115 - protein, 20 aa, Artificial Sequence
  Synthetically generated peptide
  VARIANT (1)...(20): Xaa = Any Amino Acid
PGTCGEICXAYAXXAXCTGC

SEQ ID NO: 4116 - protein, 20 aa, Artificial Sequence
  Synthetically generated peptide
  VARIANT (1)...(20): Xaa = Any Amino Acid
PGTCGEICXAYAXXACXTGC

SEQ ID NO: 4117 - protein, 20 aa, Artificial Sequence
  Synthetically generated peptide
  VARIANT (1)...(20): Xaa = Any Amino Acid
PGTCGEICXAYAXXACTXGC

SEQ ID NO: 4118 - protein, 20 aa, Artificial Sequence
  Synthetically generated peptide
  VARIANT (1)...(20): Xaa = Any Amino Acid
PGTCGEICXAYAXXACTGXC

SEQ ID NO: 4119 - protein, 20 aa, Artificial Sequence
  Synthetically generated peptide
  VARIANT (1)...(20): Xaa = Any Amino Acid
PGTCGEICXAYAXXACTGCX

SEQ ID NO: 4120 - protein, 19 aa, Artificial Sequence
  Synthetically generated peptide
  VARIANT (1)...(19): Xaa = Any Amino Acid
PGTCGEICXAYAXAXCTGC

SEQ ID NO: 4121 - protein, 20 aa, Artificial Sequence
  Synthetically generated peptide
  VARIANT (1)...(20): Xaa = Any Amino Acid
PGTCGEICXAYAXAXXCTGC

SEQ ID NO: 4122 - protein, 20 aa, Artificial Sequence
  Synthetically generated peptide
  VARIANT (1)...(20): Xaa = Any Amino Acid
PGTCGEICXAYAXAXCXTGC

SEQ ID NO: 4123 - protein, 20 aa, Artificial Sequence
  Synthetically generated peptide
  VARIANT (1)...(20): Xaa = Any Amino Acid
PGTCGEICXAYAXAXCTXGC

SEQ ID NO: 4124 - protein, 20 aa, Artificial Sequence
  Synthetically generated peptide
  VARIANT (1)...(20): Xaa = Any Amino Acid
PGTCGEICXAYAXAXCTGXC

SEQ ID NO: 4125 - protein, 20 aa, Artificial Sequence
  Synthetically generated peptide
  VARIANT (1)...(20): Xaa = Any Amino Acid
PGTCGEICXAYAXAXCTGCX

SEQ ID NO: 4126 - protein, 19 aa, Artificial Sequence
  Synthetically generated peptide
  VARIANT (1)...(19): Xaa = Any Amino Acid
PGTCGEICXAYAXACXTGC

SEQ ID NO: 4127 - protein, 20 aa, Artificial Sequence
  Synthetically generated peptide
  VARIANT (1)...(20): Xaa = Any Amino Acid
PGTCGEICXAYAXACXXTGC

SEQ ID NO: 4128 - protein, 20 aa, Artificial Sequence
  Synthetically generated peptide
  VARIANT (1)...(20): Xaa = Any Amino Acid
PGTCGEICXAYAXACXTXGC

SEQ ID NO: 4129 - protein, 20 aa, Artificial Sequence
  Synthetically generated peptide
  VARIANT (1)...(20): Xaa = Any Amino Acid
PGTCGEICXAYAXACXTGXC

SEQ ID NO: 4130 - protein, 20 aa, Artificial Sequence
  Synthetically generated peptide
  VARIANT (1)...(20): Xaa = Any Amino Acid
PGTCGEICXAYAXACXTGCX

SEQ ID NO: 4131 - protein, 19 aa, Artificial Sequence
  Synthetically generated peptide
  VARIANT (1)...(19): Xaa = Any Amino Acid
PGTCGEICXAYAXACTXGC

SEQ ID NO: 4132 - protein, 20 aa, Artificial Sequence
  Synthetically generated peptide
  VARIANT (1)...(20): Xaa = Any Amino Acid
PGTCGEICXAYAXACTXXGC

SEQ ID NO: 4133 - protein, 20 aa, Artificial Sequence
  Synthetically generated peptide
  VARIANT (1)...(20): Xaa = Any Amino Acid
PGTCGEICXAYAXACTXGXC

SEQ ID NO: 4134 - protein, 20 aa, Artificial Sequence
  Synthetically generated peptide
  VARIANT (1)...(20): Xaa = Any Amino Acid
PGTCGEICXAYAXACTXGCX

SEQ ID NO: 4135 - protein, 19 aa, Artificial Sequence
  Synthetically generated peptide
  VARIANT (1)...(19): Xaa = Any Amino Acid
PGTCGEICXAYAXACTGXC

SEQ ID NO: 4136 - protein, 20 aa, Artificial Sequence
  Synthetically generated peptide
  VARIANT (1)...(20): Xaa = Any Amino Acid
PGTCGEICXAYAXACTGXXC

SEQ ID NO: 4137 - protein, 20 aa, Artificial Sequence
  Synthetically generated peptide
  VARIANT (1)...(20): Xaa = Any Amino Acid
PGTCGEICXAYAXACTGXCX

SEQ ID NO: 4138 - protein, 19 aa, Artificial Sequence
  Synthetically generated peptide
  VARIANT (1)...(19): Xaa = Any Amino Acid
PGTCGEICXAYAXACTGCX

SEQ ID NO: 4139 - protein, 20 aa, Artificial Sequence
  Synthetically generated peptide
  VARIANT (1)...(20): Xaa = Any Amino Acid
PGTCGEICXAYAXACTGCXX

SEQ ID NO: 4140 - protein, 18 aa, Artificial Sequence
  Synthetically generated peptide
  VARIANT (1)...(18): Xaa = Any Amino Acid
PGTCGEICXAYAAXCTGC

SEQ ID NO: 4141 - protein, 19 aa, Artificial Sequence
  Synthetically generated peptide
  VARIANT (1)...(19): Xaa = Any Amino Acid
PGTCGEICXAYAAXXCTGC

SEQ ID NO: 4142 - protein, 20 aa, Artificial Sequence
  Synthetically generated peptide
  VARIANT (1)...(20): Xaa = Any Amino Acid
PGTCGEICXAYAAXXXCTGC

SEQ ID NO: 4143 - protein, 20 aa, Artificial Sequence
  Synthetically generated peptide
  VARIANT (1)...(20): Xaa = Any Amino Acid
PGTCGEICXAYAAXXCXTGC

SEQ ID NO: 4144 - protein, 20 aa, Artificial Sequence
  Synthetically generated peptide
  VARIANT (1)...(20): Xaa = Any Amino Acid
PGTCGEICXAYAAXXCTXGC

SEQ ID NO: 4145 - protein, 20 aa, Artificial Sequence
  Synthetically generated peptide
  VARIANT (1)...(20): Xaa = Any Amino Acid
PGTCGEICXAYAAXXCTGXC

SEQ ID NO: 4146 - protein, 20 aa, Artificial Sequence
  Synthetically generated peptide
  VARIANT (1)...(20): Xaa = Any Amino Acid
PGTCGEICXAYAAXXCTGCX

SEQ ID NO: 4147 - protein, 19 aa, Artificial Sequence
  Synthetically generated peptide
  VARIANT (1)...(19): Xaa = Any Amino Acid
PGTCGEICXAYAAXCXTGC

SEQ ID NO: 4148 - protein, 20 aa, Artificial Sequence
  Synthetically generated peptide
  VARIANT (1)...(20): Xaa = Any Amino Acid
PGTCGEICXAYAAXCXXTGC

SEQ ID NO: 4149 - protein, 20 aa, Artificial Sequence
  Synthetically generated peptide
  VARIANT (1)...(20): Xaa = Any Amino Acid
PGTCGEICXAYAAXCXTXGC

SEQ ID NO: 4150 - protein, 20 aa, Artificial Sequence
  Synthetically generated peptide
  VARIANT (1)...(20): Xaa = Any Amino Acid
PGTCGEICXAYAAXCXTGXC

SEQ ID NO: 4151 - protein, 20 aa, Artificial Sequence
  Synthetically generated peptide
  VARIANT (1)...(20): Xaa = Any Amino Acid
PGTCGEICXAYAAXCXTGCX

SEQ ID NO: 4152 - protein, 19 aa, Artificial Sequence
  Synthetically generated peptide
  VARIANT (1)...(19): Xaa = Any Amino Acid
PGTCGEICXAYAAXCTXGC

SEQ ID NO: 4153 - protein, 20 aa, Artificial Sequence
  Synthetically generated peptide
  VARIANT (1)...(20): Xaa = Any Amino Acid
PGTCGEICXAYAAXCTXXGC

SEQ ID NO: 4154 - protein, 20 aa, Artificial Sequence
  Synthetically generated peptide
  VARIANT (1)...(20): Xaa = Any Amino Acid
PGTCGEICXAYAAXCTXGXC

SEQ ID NO: 4155 - protein, 20 aa, Artificial Sequence
  Synthetically generated peptide
  VARIANT (1)...(20): Xaa = Any Amino Acid
PGTCGEICXAYAAXCTXGCX

SEQ ID NO: 4156 - protein, 19 aa, Artificial Sequence
  Synthetically generated peptide
  VARIANT (1)...(19): Xaa = Any Amino Acid
PGTCGEICXAYAAXCTGXC

SEQ ID NO: 4157 - protein, 20 aa, Artificial Sequence
  Synthetically generated peptide
  VARIANT (1)...(20): Xaa = Any Amino Acid
PGTCGEICXAYAAXCTGXXC

SEQ ID NO: 4158 - protein, 20 aa, Artificial Sequence
  Synthetically generated peptide
  VARIANT (1)...(20): Xaa = Any Amino Acid
PGTCGEICXAYAAXCTGXCX

SEQ ID NO: 4159 - protein, 19 aa, Artificial Sequence
  Synthetically generated peptide
  VARIANT (1)...(19): Xaa = Any Amino Acid
PGTCGEICXAYAAXCTGCX

SEQ ID NO: 4160 - protein, 20 aa, Artificial Sequence
  Synthetically generated peptide
  VARIANT (1)...(20): Xaa = Any Amino Acid
PGTCGEICXAYAAXCTGCXX

SEQ ID NO: 4161 - protein, 18 aa, Artificial Sequence
  Synthetically generated peptide
  VARIANT (1)...(18): Xaa = Any Amino Acid
PGTCGEICXAYAACXTGC

SEQ ID NO: 4162 - protein, 19 aa, Artificial Sequence
  Synthetically generated peptide
  VARIANT (1)...(19): Xaa = Any Amino Acid
PGTCGEICXAYAACXXTGC

SEQ ID NO: 4163 - protein, 20 aa, Artificial Sequence
  Synthetically generated peptide
  VARIANT (1)...(20): Xaa = Any Amino Acid
PGTCGEICXAYAACXXXTGC

SEQ ID NO: 4164 - protein, 20 aa, Artificial Sequence
  Synthetically generated peptide
  VARIANT (1)...(20): Xaa = Any Amino Acid
PGTCGEICXAYAACXXTXGC

SEQ ID NO: 4165 - protein, 20 aa, Artificial Sequence
  Synthetically generated peptide
  VARIANT (1)...(20): Xaa = Any Amino Acid
PGTCGEICXAYAACXXTGXC

SEQ ID NO: 4166 - protein, 20 aa, Artificial Sequence
  Synthetically generated peptide
  VARIANT (1)...(20): Xaa = Any Amino Acid
PGTCGEICXAYAACXXTGCX

SEQ ID NO: 4167 - protein, 19 aa, Artificial Sequence
  Synthetically generated peptide
  VARIANT (1)...(19): Xaa = Any Amino Acid
PGTCGEICXAYAACXTXGC

SEQ ID NO: 4168 - protein, 20 aa, Artificial Sequence
  Synthetically generated peptide
  VARIANT (1)...(20): Xaa = Any Amino Acid
PGTCGEICXAYAACXTXXGC

SEQ ID NO: 4169 - protein, 20 aa, Artificial Sequence
  Synthetically generated peptide
  VARIANT (1)...(20): Xaa = Any Amino Acid
PGTCGEICXAYAACXTXGXC

SEQ ID NO: 4170 - protein, 20 aa, Artificial Sequence
  Synthetically generated peptide
  VARIANT (1)...(20): Xaa = Any Amino Acid
PGTCGEICXAYAACXTXGCX

SEQ ID NO: 4171 - protein, 19 aa, Artificial Sequence
  Synthetically generated peptide
  VARIANT (1)...(19): Xaa = Any Amino Acid
PGTCGEICXAYAACXTGXC

SEQ ID NO: 4172 - protein, 20 aa, Artificial Sequence
  Synthetically generated peptide
  VARIANT (1)...(20): Xaa = Any Amino Acid
PGTCGEICXAYAACXTGXXC

SEQ ID NO: 4173 - protein, 20 aa, Artificial Sequence
  Synthetically generated peptide
  VARIANT (1)...(20): Xaa = Any Amino Acid
PGTCGEICXAYAACXTGXCX

SEQ ID NO: 4174 - protein, 19 aa, Artificial Sequence
  Synthetically generated peptide
  VARIANT (1)...(19): Xaa = Any Amino Acid
PGTCGEICXAYAACXTGCX

SEQ ID NO: 4175 - protein, 20 aa, Artificial Sequence
  Synthetically generated peptide
  VARIANT (1)...(20): Xaa = Any Amino Acid
PGTCGEICXAYAACXTGCXX

SEQ ID NO: 4176 - protein, 18 aa, Artificial Sequence
  Synthetically generated peptide
  VARIANT (1)...(18): Xaa = Any Amino Acid
PGTCGEICXAYAACTXGC

SEQ ID NO: 4177 - protein, 19 aa, Artificial Sequence
  Synthetically generated peptide
  VARIANT (1)...(19): Xaa = Any Amino Acid
PGTCGEICXAYAACTXXGC

SEQ ID NO: 4178 - protein, 20 aa, Artificial Sequence
  Synthetically generated peptide
  VARIANT (1)...(20): Xaa = Any Amino Acid
PGTCGEICXAYAACTXXXGC

SEQ ID NO: 4179 - protein, 20 aa, Artificial Sequence
  Synthetically generated peptide
  VARIANT (1)...(20): Xaa = Any Amino Acid
PGTCGEICXAYAACTXXGXC

SEQ ID NO: 4180 - protein, 20 aa, Artificial Sequence
  Synthetically generated peptide
  VARIANT (1)...(20): Xaa = Any Amino Acid
PGTCGEICXAYAACTXXGCX

SEQ ID NO: 4181 - protein, 19 aa, Artificial Sequence
  Synthetically generated peptide
  VARIANT (1)...(19): Xaa = Any Amino Acid
PGTCGEICXAYAACTXGXC

SEQ ID NO: 4182 - protein, 20 aa, Artificial Sequence
  Synthetically generated peptide
  VARIANT (1)...(20): Xaa = Any Amino Acid
PGTCGEICXAYAACTXGXXC

SEQ ID NO: 4183 - protein, 20 aa, Artificial Sequence
  Synthetically generated peptide
  VARIANT (1)...(20): Xaa = Any Amino Acid
PGTCGEICXAYAACTXGXCX

SEQ ID NO: 4184 - protein, 19 aa, Artificial Sequence
  Synthetically generated peptide
  VARIANT (1)...(19): Xaa = Any Amino Acid
PGTCGEICXAYAACTXGCX

SEQ ID NO: 4185 - protein, 20 aa, Artificial Sequence
  Synthetically generated peptide
  VARIANT (1)...(20): Xaa = Any Amino Acid
PGTCGEICXAYAACTXGCXX

SEQ ID NO: 4186 - protein, 18 aa, Artificial Sequence
  Synthetically generated peptide
  VARIANT (1)...(18): Xaa = Any Amino Acid
PGTCGEICXAYAACTGXC

SEQ ID NO: 4187 - protein, 19 aa, Artificial Sequence
  Synthetically generated peptide
  VARIANT (1)...(19): Xaa = Any Amino Acid
PGTCGEICXAYAACTGXXC

SEQ ID NO: 4188 - protein, 20 aa, Artificial Sequence
  Synthetically generated peptide
  VARIANT (1)...(20): Xaa = Any Amino Acid
PGTCGEICXAYAACTGXXXC

SEQ ID NO: 4189 - protein, 20 aa, Artificial Sequence
  Synthetically generated peptide
  VARIANT (1)...(20): Xaa = Any Amino Acid
PGTCGEICXAYAACTGXXCX

SEQ ID NO: 4190 - protein, 19 aa, Artificial Sequence
  Synthetically generated peptide
  VARIANT (1)...(19): Xaa = Any Amino Acid
PGTCGEICXAYAACTGXCX

SEQ ID NO: 4191 - protein, 20 aa, Artificial Sequence
  Synthetically generated peptide
  VARIANT (1)...(20): Xaa = Any Amino Acid
PGTCGEICXAYAACTGXCXX

SEQ ID NO: 4192 - protein, 18 aa, Artificial Sequence
  Synthetically generated peptide
  VARIANT (1)...(18): Xaa = Any Amino Acid
PGTCGEICXAYAACTGCX

SEQ ID NO: 4193 - protein, 19 aa, Artificial Sequence
  Synthetically generated peptide
  VARIANT (1)...(19): Xaa = Any Amino Acid
PGTCGEICXAYAACTGCXX

SEQ ID NO: 4194 - protein, 20 aa, Artificial Sequence
  Synthetically generated peptide
  VARIANT (1)...(20): Xaa = Any Amino Acid
PGTCGEICXAYAACTGCXXX

SEQ ID NO: 4195 - protein, 17 aa, Artificial Sequence
  Synthetically generated peptide
  VARIANT (1)...(17): Xaa = Any Amino Acid
PGTCGEICAXYAACTGC

SEQ ID NO: 4196 - protein, 18 aa, Artificial Sequence
  Synthetically generated peptide
  VARIANT (1)...(18): Xaa = Any Amino Acid
PGTCGEICAXXYAACTGC

SEQ ID NO: 4197 - protein, 19 aa, Artificial Sequence
  Synthetically generated peptide
  VARIANT (1)...(19): Xaa = Any Amino Acid
PGTCGEICAXXXYAACTGC

SEQ ID NO: 4198 - protein, 20 aa, Artificial Sequence
  Synthetically generated peptide
  VARIANT (1)...(20): Xaa = Any Amino Acid
PGTCGEICAXXXXYAACTGC

SEQ ID NO: 4199 - protein, 20 aa, Artificial Sequence
  Synthetically generated peptide
  VARIANT (1)...(20): Xaa = Any Amino Acid
PGTCGEICAXXXYXAACTGC

SEQ ID NO: 4200 - protein, 20 aa, Artificial Sequence
  Synthetically generated peptide
  VARIANT (1)...(20): Xaa = Any Amino Acid
PGTCGEICAXXXYAXACTGC

SEQ ID NO: 4201 - protein, 20 aa, Artificial Sequence
  Synthetically generated peptide
  VARIANT (1)...(20): Xaa = Any Amino Acid
PGTCGEICAXXXYAAXCTGC

SEQ ID NO: 4202 - protein, 20 aa, Artificial Sequence
  Synthetically generated peptide
  VARIANT (1)...(20): Xaa = Any Amino Acid
PGTCGEICAXXXYAACXTGC

SEQ ID NO: 4203 - protein, 20 aa, Artificial Sequence
  Synthetically generated peptide
  VARIANT (1)...(20): Xaa = Any Amino Acid
PGTCGEICAXXXYAACTXGC

SEQ ID NO: 4204 - protein, 20 aa, Artificial Sequence
  Synthetically generated peptide
  VARIANT (1)...(20): Xaa = Any Amino Acid
PGTCGEICAXXXYAACTGXC

SEQ ID NO: 4205 - protein, 20 aa, Artificial Sequence
  Synthetically generated peptide
  VARIANT (1)...(20): Xaa = Any Amino Acid
PGTCGEICAXXXYAACTGCX

SEQ ID NO: 4206 - protein, 19 aa, Artificial Sequence
  Synthetically generated peptide
  VARIANT (1)...(19): Xaa = Any Amino Acid
PGTCGEICAXXYXAACTGC

SEQ ID NO: 4207 - protein, 20 aa, Artificial Sequence
  Synthetically generated peptide
  VARIANT (1)...(20): Xaa = Any Amino Acid
PGTCGEICAXXYXXAACTGC

SEQ ID NO: 4208 - protein, 20 aa, Artificial Sequence
  Synthetically generated peptide
  VARIANT (1)...(20): Xaa = Any Amino Acid
PGTCGEICAXXYXAXACTGC

SEQ ID NO: 4209 - protein, 20 aa, Artificial Sequence
  Synthetically generated peptide
  VARIANT (1)...(20): Xaa = Any Amino Acid
PGTCGEICAXXYXAAXCTGC

SEQ ID NO: 4210 - protein, 20 aa, Artificial Sequence
  Synthetically generated peptide
  VARIANT (1)...(20): Xaa = Any Amino Acid
PGTCGEICAXXYXAACXTGC

SEQ ID NO: 4211 - protein, 20 aa, Artificial Sequence
  Synthetically generated peptide
  VARIANT (1)...(20): Xaa = Any Amino Acid
PGTCGEICAXXYXAACTXGC

SEQ ID NO: 4212 - protein, 20 aa, Artificial Sequence
  Synthetically generated peptide
  VARIANT (1)...(20): Xaa = Any Amino Acid
PGTCGEICAXXYXAACTGXC

SEQ ID NO: 4213 - protein, 20 aa, Artificial Sequence
  Synthetically generated peptide
  VARIANT (1)...(20): Xaa = Any Amino Acid
PGTCGEICAXXYXAACTGCX

SEQ ID NO: 4214 - protein, 19 aa, Artificial Sequence
  Synthetically generated peptide
  VARIANT (1)...(19): Xaa = Any Amino Acid
PGTCGEICAXXYAXACTGC

SEQ ID NO: 4215 - protein, 20 aa, Artificial Sequence
  Synthetically generated peptide
  VARIANT (1)...(20): Xaa = Any Amino Acid
PGTCGEICAXXYAXXACTGC

SEQ ID NO: 4216 - protein, 20 aa, Artificial Sequence
  Synthetically generated peptide
  VARIANT (1)...(20): Xaa = Any Amino Acid
PGTCGEICAXXYAXAXCTGC

SEQ ID NO: 4217 - protein, 20 aa, Artificial Sequence
  Synthetically generated peptide
  VARIANT (1)...(20): Xaa = Any Amino Acid
PGTCGEICAXXYAXACXTGC

SEQ ID NO: 4218 - protein, 20 aa, Artificial Sequence
  Synthetically generated peptide
  VARIANT (1)...(20): Xaa = Any Amino Acid
PGTCGEICAXXYAXACTXGC

SEQ ID NO: 4219 - protein, 20 aa, Artificial Sequence
  Synthetically generated peptide
  VARIANT (1)...(20): Xaa = Any Amino Acid
PGTCGEICAXXYAXACTGXC

SEQ ID NO: 4220 - protein, 20 aa, Artificial Sequence
  Synthetically generated peptide
  VARIANT (1)...(20): Xaa = Any Amino Acid
PGTCGEICAXXYAXACTGCX

SEQ ID NO: 4221 - protein, 19 aa, Artificial Sequence
  Synthetically generated peptide
  VARIANT (1)...(19): Xaa = Any Amino Acid
PGTCGEICAXXYAAXCTGC

SEQ ID NO: 4222 - protein, 20 aa, Artificial Sequence
  Synthetically generated peptide
  VARIANT (1)...(20): Xaa = Any Amino Acid
PGTCGEICAXXYAAXXCTGC

SEQ ID NO: 4223 - protein, 20 aa, Artificial Sequence
  Synthetically generated peptide
  VARIANT (1)...(20): Xaa = Any Amino Acid
PGTCGEICAXXYAAXCXTGC

SEQ ID NO: 4224 - protein, 20 aa, Artificial Sequence
  Synthetically generated peptide
  VARIANT (1)...(20): Xaa = Any Amino Acid
PGTCGEICAXXYAAXCTXGC

SEQ ID NO: 4225 - protein, 20 aa, Artificial Sequence
  Synthetically generated peptide
  VARIANT (1)...(20): Xaa = Any Amino Acid
PGTCGEICAXXYAAXCTGXC

SEQ ID NO: 4226 - protein, 20 aa, Artificial Sequence
  Synthetically generated peptide
  VARIANT (1)...(20): Xaa = Any Amino Acid
PGTCGEICAXXYAAXCTGCX

SEQ ID NO: 4227 - protein, 19 aa, Artificial Sequence
  Synthetically generated peptide
  VARIANT (1)...(19): Xaa = Any Amino Acid
PGTCGEICAXXYAACXTGC

SEQ ID NO: 4228 - protein, 20 aa, Artificial Sequence
  Synthetically generated peptide
  VARIANT (1)...(20): Xaa = Any Amino Acid
PGTCGEICAXXYAACXXTGC

SEQ ID NO: 4229 - protein, 20 aa, Artificial Sequence
  Synthetically generated peptide
  VARIANT (1)...(20): Xaa = Any Amino Acid
PGTCGEICAXXYAACXTXGC

SEQ ID NO: 4230 - protein, 20 aa, Artificial Sequence
  Synthetically generated peptide
  VARIANT (1)...(20): Xaa = Any Amino Acid
PGTCGEICAXXYAACXTGXC

SEQ ID NO: 4231 - protein, 20 aa, Artificial Sequence
  Synthetically generated peptide
  VARIANT (1)...(20): Xaa = Any Amino Acid
PGTCGEICAXXYAACXTGCX

SEQ ID NO: 4232 - protein, 19 aa, Artificial Sequence
  Synthetically generated peptide
  VARIANT (1)...(19): Xaa = Any Amino Acid
PGTCGEICAXXYAACTXGC

SEQ ID NO: 4233 - protein, 20 aa, Artificial Sequence
  Synthetically generated peptide
  VARIANT (1)...(20): Xaa = Any Amino Acid
PGTCGEICAXXYAACTXXGC

SEQ ID NO: 4234 - protein, 20 aa, Artificial Sequence
  Synthetically generated peptide
  VARIANT (1)...(20): Xaa = Any Amino Acid
PGTCGEICAXXYAACTXGXC

SEQ ID NO: 4235 - protein, 20 aa, Artificial Sequence
  Synthetically generated peptide
  VARIANT (1)...(20): Xaa = Any Amino Acid
PGTCGEICAXXYAACTXGCX

SEQ ID NO: 4236 - protein, 19 aa, Artificial Sequence
  Synthetically generated peptide
  VARIANT (1)...(19): Xaa = Any Amino Acid
PGTCGEICAXXYAACTGXC

SEQ ID NO: 4237 - protein, 20 aa, Artificial Sequence
  Synthetically generated peptide
  VARIANT (1)...(20): Xaa = Any Amino Acid
PGTCGEICAXXYAACTGXXC

SEQ ID NO: 4238 - protein, 20 aa, Artificial Sequence
  Synthetically generated peptide
  VARIANT (1)...(20): Xaa = Any Amino Acid
PGTCGEICAXXYAACTGXCX

SEQ ID NO: 4239 - protein, 19 aa, Artificial Sequence
  Synthetically generated peptide
  VARIANT (1)...(19): Xaa = Any Amino Acid
PGTCGEICAXXYAACTGCX

SEQ ID NO: 4240 - protein, 20 aa, Artificial Sequence
  Synthetically generated peptide
  VARIANT (1)...(20): Xaa = Any Amino Acid
PGTCGEICAXXYAACTGCXX

SEQ ID NO: 4241 - protein, 18 aa, Artificial Sequence
  Synthetically generated peptide
  VARIANT (1)...(18): Xaa = Any Amino Acid
PGTCGEICAXYXAACTGC

SEQ ID NO: 4242 - protein, 19 aa, Artificial Sequence
  Synthetically generated peptide
  VARIANT (1)...(19): Xaa = Any Amino Acid
PGTCGEICAXYXXAACTGC

SEQ ID NO: 4243 - protein, 20 aa, Artificial Sequence
  Synthetically generated peptide
  VARIANT (1)...(20): Xaa = Any Amino Acid
PGTCGEICAXYXXXAACTGC

SEQ ID NO: 4244 - protein, 20 aa, Artificial Sequence
  Synthetically generated peptide
  VARIANT (1)...(20): Xaa = Any Amino Acid
PGTCGEICAXYXXAXACTGC

SEQ ID NO: 4245 - protein, 20 aa, Artificial Sequence
  Synthetically generated peptide
  VARIANT (1)...(20): Xaa = Any Amino Acid
PGTCGEICAXYXXAAXCTGC

SEQ ID NO: 4246 - protein, 20 aa, Artificial Sequence
  Synthetically generated peptide
  VARIANT (1)...(20): Xaa = Any Amino Acid
PGTCGEICAXYXXAACXTGC

SEQ ID NO: 4247 - protein, 20 aa, Artificial Sequence
  Synthetically generated peptide
  VARIANT (1)...(20): Xaa = Any Amino Acid
PGTCGEICAXYXXAACTXGC

SEQ ID NO: 4248 - protein, 20 aa, Artificial Sequence
  Synthetically generated peptide
  VARIANT (1)...(20): Xaa = Any Amino Acid
PGTCGEICAXYXXAACTGXC

SEQ ID NO: 4249 - protein, 20 aa, Artificial Sequence
  Synthetically generated peptide
  VARIANT (1)...(20): Xaa = Any Amino Acid
PGTCGEICAXYXXAACTGCX

SEQ ID NO: 4250 - protein, 19 aa, Artificial Sequence
  Synthetically generated peptide
  VARIANT (1)...(19): Xaa = Any Amino Acid
PGTCGEICAXYXAXACTGC

SEQ ID NO: 4251 - protein, 20 aa, Artificial Sequence
  Synthetically generated peptide
  VARIANT (1)...(20): Xaa = Any Amino Acid
PGTCGEICAXYXAXXACTGC

SEQ ID NO: 4252 - protein, 20 aa, Artificial Sequence
  Synthetically generated peptide
  VARIANT (1)...(20): Xaa = Any Amino Acid
PGTCGEICAXYXAXAXCTGC

SEQ ID NO: 4253 - protein, 20 aa, Artificial Sequence
  Synthetically generated peptide
  VARIANT (1)...(20): Xaa = Any Amino Acid
PGTCGEICAXYXAXACXTGC

SEQ ID NO: 4254 - protein, 20 aa, Artificial Sequence
  Synthetically generated peptide
  VARIANT (1)...(20): Xaa = Any Amino Acid
PGTCGEICAXYXAXACTXGC

SEQ ID NO: 4255 - protein, 20 aa, Artificial Sequence
  Synthetically generated peptide
  VARIANT (1)...(20): Xaa = Any Amino Acid
PGTCGEICAXYXAXACTGXC

SEQ ID NO: 4256 - protein, 20 aa, Artificial Sequence
  Synthetically generated peptide
  VARIANT (1)...(20): Xaa = Any Amino Acid
PGTCGEICAXYXAXACTGCX

SEQ ID NO: 4257 - protein, 19 aa, Artificial Sequence
  Synthetically generated peptide
  VARIANT (1)...(19): Xaa = Any Amino Acid
PGTCGEICAXYXAAXCTGC

SEQ ID NO: 4258 - protein, 20 aa, Artificial Sequence
  Synthetically generated peptide
  VARIANT (1)...(20): Xaa = Any Amino Acid
PGTCGEICAXYXAAXXCTGC

SEQ ID NO: 4259 - protein, 20 aa, Artificial Sequence
  Synthetically generated peptide
  VARIANT (1)...(20): Xaa = Any Amino Acid
PGTCGEICAXYXAAXCXTGC

SEQ ID NO: 4260 - protein, 20 aa, Artificial Sequence
  Synthetically generated peptide
  VARIANT (1)...(20): Xaa = Any Amino Acid
PGTCGEICAXYXAAXCTXGC

SEQ ID NO: 4261 - protein, 20 aa, Artificial Sequence
  Synthetically generated peptide
  VARIANT (1)...(20): Xaa = Any Amino Acid
PGTCGEICAXYXAAXCTGXC

SEQ ID NO: 4262 - protein, 20 aa, Artificial Sequence
  Synthetically generated peptide
  VARIANT (1)...(20): Xaa = Any Amino Acid
PGTCGEICAXYXAAXCTGCX

SEQ ID NO: 4263 - protein, 19 aa, Artificial Sequence
  Synthetically generated peptide
  VARIANT (1)...(19): Xaa = Any Amino Acid
PGTCGEICAXYXAACXTGC

SEQ ID NO: 4264 - protein, 20 aa, Artificial Sequence
  Synthetically generated peptide
  VARIANT (1)...(20): Xaa = Any Amino Acid
PGTCGEICAXYXAACXXTGC

SEQ ID NO: 4265 - protein, 20 aa, Artificial Sequence
  Synthetically generated peptide
  VARIANT (1)...(20): Xaa = Any Amino Acid
PGTCGEICAXYXAACXTXGC

SEQ ID NO: 4266 - protein, 20 aa, Artificial Sequence
  Synthetically generated peptide
  VARIANT (1)...(20): Xaa = Any Amino Acid
PGTCGEICAXYXAACXTGXC

SEQ ID NO: 4267 - protein, 20 aa, Artificial Sequence
  Synthetically generated peptide
  VARIANT (1)...(20): Xaa = Any Amino Acid
PGTCGEICAXYXAACXTGCX

SEQ ID NO: 4268 - protein, 19 aa, Artificial Sequence
  Synthetically generated peptide
  VARIANT (1)...(19): Xaa = Any Amino Acid
PGTCGEICAXYXAACTXGC

SEQ ID NO: 4269 - protein, 20 aa, Artificial Sequence
  Synthetically generated peptide
  VARIANT (1)...(20): Xaa = Any Amino Acid
PGTCGEICAXYXAACTXXGC

SEQ ID NO: 4270 - protein, 20 aa, Artificial Sequence
  Synthetically generated peptide
  VARIANT (1)...(20): Xaa = Any Amino Acid
PGTCGEICAXYXAACTXGXC

SEQ ID NO: 4271 - protein, 20 aa, Artificial Sequence
  Synthetically generated peptide
  VARIANT (1)...(20): Xaa = Any Amino Acid
PGTCGEICAXYXAACTXGCX

SEQ ID NO: 4272 - protein, 19 aa, Artificial Sequence
  Synthetically generated peptide
  VARIANT (1)...(19): Xaa = Any Amino Acid
PGTCGEICAXYXAACTGXC

SEQ ID NO: 4273 - protein, 20 aa, Artificial Sequence
  Synthetically generated peptide
  VARIANT (1)...(20): Xaa = Any Amino Acid
PGTCGEICAXYXAACTGXXC

SEQ ID NO: 4274 - protein, 20 aa, Artificial Sequence
  Synthetically generated peptide
  VARIANT (1)...(20): Xaa = Any Amino Acid
PGTCGEICAXYXAACTGXCX

SEQ ID NO: 4275 - protein, 19 aa, Artificial Sequence
  Synthetically generated peptide
  VARIANT (1)...(19): Xaa = Any Amino Acid
PGTCGEICAXYXAACTGCX

SEQ ID NO: 4276 - protein, 20 aa, Artificial Sequence
  Synthetically generated peptide
  VARIANT (1)...(20): Xaa = Any Amino Acid
PGTCGEICAXYXAACTGCXX

SEQ ID NO: 4277 - protein, 18 aa, Artificial Sequence
  Synthetically generated peptide
  VARIANT (1)...(18): Xaa = Any Amino Acid
PGTCGEICAXYAXACTGC

SEQ ID NO: 4278 - protein, 19 aa, Artificial Sequence
  Synthetically generated peptide
  VARIANT (1)...(19): Xaa = Any Amino Acid
PGTCGEICAXYAXXACTGC

SEQ ID NO: 4279 - protein, 20 aa, Artificial Sequence
  Synthetically generated peptide
  VARIANT (1)...(20): Xaa = Any Amino Acid
PGTCGEICAXYAXXXACTGC

SEQ ID NO: 4280 - protein, 20 aa, Artificial Sequence
  Synthetically generated peptide
  VARIANT (1)...(20): Xaa = Any Amino Acid
PGTCGEICAXYAXXAXCTGC

SEQ ID NO: 4281 - protein, 20 aa, Artificial Sequence
  Synthetically generated peptide
  VARIANT (1)...(20): Xaa = Any Amino Acid
PGTCGEICAXYAXXACXTGC

SEQ ID NO: 4282 - protein, 20 aa, Artificial Sequence
  Synthetically generated peptide
  VARIANT (1)...(20): Xaa = Any Amino Acid
PGTCGEICAXYAXXACTXGC

SEQ ID NO: 4283 - protein, 20 aa, Artificial Sequence
  Synthetically generated peptide
  VARIANT (1)...(20): Xaa = Any Amino Acid
PGTCGEICAXYAXXACTGXC

SEQ ID NO: 4284 - protein, 20 aa, Artificial Sequence
  Synthetically generated peptide
  VARIANT (1)...(20): Xaa = Any Amino Acid
PGTCGEICAXYAXXACTGCX

SEQ ID NO: 4285 - protein, 19 aa, Artificial Sequence
  Synthetically generated peptide
  VARIANT (1)...(19): Xaa = Any Amino Acid
PGTCGEICAXYAXAXCTGC

SEQ ID NO: 4286 - protein, 20 aa, Artificial Sequence
  Synthetically generated peptide
  VARIANT (1)...(20): Xaa = Any Amino Acid
PGTCGEICAXYAXAXXCTGC

SEQ ID NO: 4287 - protein, 20 aa, Artificial Sequence
  Synthetically generated peptide
  VARIANT (1)...(20): Xaa = Any Amino Acid
PGTCGEICAXYAXAXCXTGC

SEQ ID NO: 4288 - protein, 20 aa, Artificial Sequence
  Synthetically generated peptide
  VARIANT (1)...(20): Xaa = Any Amino Acid
PGTCGEICAXYAXAXCTXGC

SEQ ID NO: 4289 - protein, 20 aa, Artificial Sequence
  Synthetically generated peptide
  VARIANT (1)...(20): Xaa = Any Amino Acid
PGTCGEICAXYAXAXCTGXC

SEQ ID NO: 4290 - protein, 20 aa, Artificial Sequence
  Synthetically generated peptide
  VARIANT (1)...(20): Xaa = Any Amino Acid
PGTCGEICAXYAXAXCTGCX

SEQ ID NO: 4291 - protein, 19 aa, Artificial Sequence
  Synthetically generated peptide
  VARIANT (1)...(19): Xaa = Any Amino Acid
PGTCGEICAXYAXACXTGC

SEQ ID NO: 4292 - protein, 20 aa, Artificial Sequence
  Synthetically generated peptide
  VARIANT (1)...(20): Xaa = Any Amino Acid
PGTCGEICAXYAXACXXTGC

SEQ ID NO: 4293 - protein, 20 aa, Artificial Sequence
  Synthetically generated peptide
  VARIANT (1)...(20): Xaa = Any Amino Acid
PGTCGEICAXYAXACXTXGC

SEQ ID NO: 4294 - protein, 20 aa, Artificial Sequence
  Synthetically generated peptide
  VARIANT (1)...(20): Xaa = Any Amino Acid
PGTCGEICAXYAXACXTGXC

SEQ ID NO: 4295 - protein, 20 aa, Artificial Sequence
  Synthetically generated peptide
  VARIANT (1)...(20): Xaa = Any Amino Acid
PGTCGEICAXYAXACXTGCX

SEQ ID NO: 4296 - protein, 19 aa, Artificial Sequence
  Synthetically generated peptide
  VARIANT (1)...(19): Xaa = Any Amino Acid
PGTCGEICAXYAXACTXGC

SEQ ID NO: 4297 - protein, 20 aa, Artificial Sequence
  Synthetically generated peptide
  VARIANT (1)...(20): Xaa = Any Amino Acid
PGTCGEICAXYAXACTXXGC

SEQ ID NO: 4298 - protein, 20 aa, Artificial Sequence
  Synthetically generated peptide
  VARIANT (1)...(20): Xaa = Any Amino Acid
PGTCGEICAXYAXACTXGXC

SEQ ID NO: 4299 - protein, 20 aa, Artificial Sequence
  Synthetically generated peptide
  VARIANT (1)...(20): Xaa = Any Amino Acid
PGTCGEICAXYAXACTXGCX

SEQ ID NO: 4300 - protein, 19 aa, Artificial Sequence
  Synthetically generated peptide
  VARIANT (1)...(19): Xaa = Any Amino Acid
PGTCGEICAXYAXACTGXC

SEQ ID NO: 4301 - protein, 20 aa, Artificial Sequence
  Synthetically generated peptide
  VARIANT (1)...(20): Xaa = Any Amino Acid
PGTCGEICAXYAXACTGXXC

SEQ ID NO: 4302 - protein, 20 aa, Artificial Sequence
  Synthetically generated peptide
  VARIANT (1)...(20): Xaa = Any Amino Acid
PGTCGEICAXYAXACTGXCX

SEQ ID NO: 4303 - protein, 19 aa, Artificial Sequence
  Synthetically generated peptide
  VARIANT (1)...(19): Xaa = Any Amino Acid
PGTCGEICAXYAXACTGCX

SEQ ID NO: 4304 - protein, 20 aa, Artificial Sequence
  Synthetically generated peptide
  VARIANT (1)...(20): Xaa = Any Amino Acid
PGTCGEICAXYAXACTGCXX

SEQ ID NO: 4305 - protein, 18 aa, Artificial Sequence
  Synthetically generated peptide
  VARIANT (1)...(18): Xaa = Any Amino Acid
PGTCGEICAXYAAXCTGC

SEQ ID NO: 4306 - protein, 19 aa, Artificial Sequence
  Synthetically generated peptide
  VARIANT (1)...(19): Xaa = Any Amino Acid
PGTCGEICAXYAAXXCTGC

SEQ ID NO: 4307 - protein, 20 aa, Artificial Sequence
  Synthetically generated peptide
  VARIANT (1)...(20): Xaa = Any Amino Acid
PGTCGEICAXYAAXXXCTGC

SEQ ID NO: 4308 - protein, 20 aa, Artificial Sequence
  Synthetically generated peptide
  VARIANT (1)...(20): Xaa = Any Amino Acid
PGTCGEICAXYAAXXCXTGC

SEQ ID NO: 4309 - protein, 20 aa, Artificial Sequence
  Synthetically generated peptide
  VARIANT (1)...(20): Xaa = Any Amino Acid
PGTCGEICAXYAAXXCTXGC

SEQ ID NO: 4310 - protein, 20 aa, Artificial Sequence
  Synthetically generated peptide
  VARIANT (1)...(20): Xaa = Any Amino Acid
PGTCGEICAXYAAXXCTGXC

SEQ ID NO: 4311 - protein, 20 aa, Artificial Sequence
  Synthetically generated peptide
  VARIANT (1)...(20): Xaa = Any Amino Acid
PGTCGEICAXYAAXXCTGCX

SEQ ID NO: 4312 - protein, 19 aa, Artificial Sequence
  Synthetically generated peptide
  VARIANT (1)...(19): Xaa = Any Amino Acid
PGTCGEICAXYAAXCXTGC

SEQ ID NO: 4313 - protein, 20 aa, Artificial Sequence
  Synthetically generated peptide
  VARIANT (1)...(20): Xaa = Any Amino Acid
PGTCGEICAXYAAXCXXTGC

SEQ ID NO: 4314 - protein, 20 aa, Artificial Sequence
  Synthetically generated peptide
  VARIANT (1)...(20): Xaa = Any Amino Acid
PGTCGEICAXYAAXCXTXGC

SEQ ID NO: 4315 - protein, 20 aa, Artificial Sequence
  Synthetically generated peptide
  VARIANT (1)...(20): Xaa = Any Amino Acid
PGTCGEICAXYAAXCXTGXC

SEQ ID NO: 4316 - protein, 20 aa, Artificial Sequence
  Synthetically generated peptide
  VARIANT (1)...(20): Xaa = Any Amino Acid
PGTCGEICAXYAAXCXTGCX

SEQ ID NO: 4317 - protein, 19 aa, Artificial Sequence
  Synthetically generated peptide
  VARIANT (1)...(19): Xaa = Any Amino Acid
PGTCGEICAXYAAXCTXGC

SEQ ID NO: 4318 - protein, 20 aa, Artificial Sequence
  Synthetically generated peptide
  VARIANT (1)...(20): Xaa = Any Amino Acid
PGTCGEICAXYAAXCTXXGC

SEQ ID NO: 4319 - protein, 20 aa, Artificial Sequence
  Synthetically generated peptide
  VARIANT (1)...(20): Xaa = Any Amino Acid
PGTCGEICAXYAAXCTXGXC

SEQ ID NO: 4320 - protein, 20 aa, Artificial Sequence
  Synthetically generated peptide
  VARIANT (1)...(20): Xaa = Any Amino Acid
PGTCGEICAXYAAXCTXGCX

SEQ ID NO: 4321 - protein, 19 aa, Artificial Sequence
  Synthetically generated peptide
  VARIANT (1)...(19): Xaa = Any Amino Acid
PGTCGEICAXYAAXCTGXC

SEQ ID NO: 4322 - protein, 20 aa, Artificial Sequence
  Synthetically generated peptide
  VARIANT (1)...(20): Xaa = Any Amino Acid
PGTCGEICAXYAAXCTGXXC

SEQ ID NO: 4323 - protein, 20 aa, Artificial Sequence
  Synthetically generated peptide
  VARIANT (1)...(20): Xaa = Any Amino Acid
PGTCGEICAXYAAXCTGXCX

SEQ ID NO: 4324 - protein, 19 aa, Artificial Sequence
  Synthetically generated peptide
  VARIANT (1)...(19): Xaa = Any Amino Acid
PGTCGEICAXYAAXCTGCX

SEQ ID NO: 4325 - protein, 20 aa, Artificial Sequence
  Synthetically generated peptide
  VARIANT (1)...(20): Xaa = Any Amino Acid
PGTCGEICAXYAAXCTGCXX

SEQ ID NO: 4326 - protein, 18 aa, Artificial Sequence
  Synthetically generated peptide
  VARIANT (1)...(18): Xaa = Any Amino Acid
PGTCGEICAXYAACXTGC

SEQ ID NO: 4327 - protein, 19 aa, Artificial Sequence
  Synthetically generated peptide
  VARIANT (1)...(19): Xaa = Any Amino Acid
PGTCGEICAXYAACXXTGC

SEQ ID NO: 4328 - protein, 20 aa, Artificial Sequence
  Synthetically generated peptide
  VARIANT (1)...(20): Xaa = Any Amino Acid
PGTCGEICAXYAACXXXTGC

SEQ ID NO: 4329 - protein, 20 aa, Artificial Sequence
  Synthetically generated peptide
  VARIANT (1)...(20): Xaa = Any Amino Acid
PGTCGEICAXYAACXXTXGC

SEQ ID NO: 4330 - protein, 20 aa, Artificial Sequence
  Synthetically generated peptide
  VARIANT (1)...(20): Xaa = Any Amino Acid
PGTCGEICAXYAACXXTGXC

SEQ ID NO: 4331 - protein, 20 aa, Artificial Sequence
  Synthetically generated peptide
  VARIANT (1)...(20): Xaa = Any Amino Acid
PGTCGEICAXYAACXXTGCX

SEQ ID NO: 4332 - protein, 19 aa, Artificial Sequence
  Synthetically generated peptide
  VARIANT (1)...(19): Xaa = Any Amino Acid
PGTCGEICAXYAACXTXGC

SEQ ID NO: 4333 - protein, 20 aa, Artificial Sequence
  Synthetically generated peptide
  VARIANT (1)...(20): Xaa = Any Amino Acid
PGTCGEICAXYAACXTXXGC

SEQ ID NO: 4334 - protein, 20 aa, Artificial Sequence
  Synthetically generated peptide
  VARIANT (1)...(20): Xaa = Any Amino Acid
PGTCGEICAXYAACXTXGXC

SEQ ID NO: 4335 - protein, 20 aa, Artificial Sequence
  Synthetically generated peptide
  VARIANT (1)...(20): Xaa = Any Amino Acid
PGTCGEICAXYAACXTXGCX

SEQ ID NO: 4336 - protein, 19 aa, Artificial Sequence
  Synthetically generated peptide
  VARIANT (1)...(19): Xaa = Any Amino Acid
PGTCGEICAXYAACXTGXC

SEQ ID NO: 4337 - protein, 20 aa, Artificial Sequence
  Synthetically generated peptide
  VARIANT (1)...(20): Xaa = Any Amino Acid
PGTCGEICAXYAACXTGXXC

SEQ ID NO: 4338 - protein, 20 aa, Artificial Sequence
  Synthetically generated peptide
  VARIANT (1)...(20): Xaa = Any Amino Acid
PGTCGEICAXYAACXTGXCX

SEQ ID NO: 4339 - protein, 19 aa, Artificial Sequence
  Synthetically generated peptide
  VARIANT (1)...(19): Xaa = Any Amino Acid
PGTCGEICAXYAACXTGCX

SEQ ID NO: 4340 - protein, 20 aa, Artificial Sequence
  Synthetically generated peptide
  VARIANT (1)...(20): Xaa = Any Amino Acid
PGTCGEICAXYAACXTGCXX

SEQ ID NO: 4341 - protein, 18 aa, Artificial Sequence
  Synthetically generated peptide
  VARIANT (1)...(18): Xaa = Any Amino Acid
PGTCGEICAXYAACTXGC

SEQ ID NO: 4342 - protein, 19 aa, Artificial Sequence
  Synthetically generated peptide
  VARIANT (1)...(19): Xaa = Any Amino Acid
PGTCGEICAXYAACTXXGC

SEQ ID NO: 4343 - protein, 20 aa, Artificial Sequence
  Synthetically generated peptide
  VARIANT (1)...(20): Xaa = Any Amino Acid
PGTCGEICAXYAACTXXXGC

SEQ ID NO: 4344 - protein, 20 aa, Artificial Sequence
  Synthetically generated peptide
  VARIANT (1)...(20): Xaa = Any Amino Acid
PGTCGEICAXYAACTXXGXC

SEQ ID NO: 4345 - protein, 20 aa, Artificial Sequence
  Synthetically generated peptide
  VARIANT (1)...(20): Xaa = Any Amino Acid
PGTCGEICAXYAACTXXGCX

SEQ ID NO: 4346 - protein, 19 aa, Artificial Sequence
  Synthetically generated peptide
  VARIANT (1)...(19): Xaa = Any Amino Acid
PGTCGEICAXYAACTXGXC

SEQ ID NO: 4347 - protein, 20 aa, Artificial Sequence
  Synthetically generated peptide
  VARIANT (1)...(20): Xaa = Any Amino Acid
PGTCGEICAXYAACTXGXXC

SEQ ID NO: 4348 - protein, 20 aa, Artificial Sequence
  Synthetically generated peptide
  VARIANT (1)...(20): Xaa = Any Amino Acid
PGTCGEICAXYAACTXGXCX

SEQ ID NO: 4349 - protein, 19 aa, Artificial Sequence
  Synthetically generated peptide
  VARIANT (1)...(19): Xaa = Any Amino Acid
PGTCGEICAXYAACTXGCX

SEQ ID NO: 4350 - protein, 20 aa, Artificial Sequence
  Synthetically generated peptide
  VARIANT (1)...(20): Xaa = Any Amino Acid
PGTCGEICAXYAACTXGCXX

SEQ ID NO: 4351 - protein, 18 aa, Artificial Sequence
  Synthetically generated peptide
  VARIANT (1)...(18): Xaa = Any Amino Acid
PGTCGEICAXYAACTGXC

SEQ ID NO: 4352 - protein, 19 aa, Artificial Sequence
  Synthetically generated peptide
  VARIANT (1)...(19): Xaa = Any Amino Acid
PGTCGEICAXYAACTGXXC

SEQ ID NO: 4353 - protein, 20 aa, Artificial Sequence
  Synthetically generated peptide
  VARIANT (1)...(20): Xaa = Any Amino Acid
PGTCGEICAXYAACTGXXXC

SEQ ID NO: 4354 - protein, 20 aa, Artificial Sequence
  Synthetically generated peptide
  VARIANT (1)...(20): Xaa = Any Amino Acid
PGTCGEICAXYAACTGXXCX

SEQ ID NO: 4355 - protein, 19 aa, Artificial Sequence
  Synthetically generated peptide
  VARIANT (1)...(19): Xaa = Any Amino Acid
PGTCGEICAXYAACTGXCX

SEQ ID NO: 4356 - protein, 20 aa, Artificial Sequence
  Synthetically generated peptide
  VARIANT (1)...(20): Xaa = Any Amino Acid
PGTCGEICAXYAACTGXCXX

SEQ ID NO: 4357 - protein, 18 aa, Artificial Sequence
  Synthetically generated peptide
  VARIANT (1)...(18): Xaa = Any Amino Acid
PGTCGEICAXYAACTGCX

SEQ ID NO: 4358 - protein, 19 aa, Artificial Sequence
  Synthetically generated peptide
  VARIANT (1)...(19): Xaa = Any Amino Acid
PGTCGEICAXYAACTGCXX

SEQ ID NO: 4359 - protein, 20 aa, Artificial Sequence
  Synthetically generated peptide
  VARIANT (1)...(20): Xaa = Any Amino Acid
PGTCGEICAXYAACTGCXXX

SEQ ID NO: 4360 - protein, 17 aa, Artificial Sequence
  Synthetically generated peptide
  VARIANT (1)...(17): Xaa = Any Amino Acid
PGTCGEICAYXAACTGC

SEQ ID NO: 4361 - protein, 18 aa, Artificial Sequence
  Synthetically generated peptide
  VARIANT (1)...(18): Xaa = Any Amino Acid
PGTCGEICAYXXAACTGC

SEQ ID NO: 4362 - protein, 19 aa, Artificial Sequence
  Synthetically generated peptide
  VARIANT (1)...(19): Xaa = Any Amino Acid
PGTCGEICAYXXXAACTGC

SEQ ID NO: 4363 - protein, 20 aa, Artificial Sequence
  Synthetically generated peptide
  VARIANT (1)...(20): Xaa = Any Amino Acid
PGTCGEICAYXXXXAACTGC

SEQ ID NO: 4364 - protein, 20 aa, Artificial Sequence
  Synthetically generated peptide
  VARIANT (1)...(20): Xaa = Any Amino Acid
PGTCGEICAYXXXAXACTGC

SEQ ID NO: 4365 - protein, 20 aa, Artificial Sequence
  Synthetically generated peptide
  VARIANT (1)...(20): Xaa = Any Amino Acid
PGTCGEICAYXXXAAXCTGC

SEQ ID NO: 4366 - protein, 20 aa, Artificial Sequence
  Synthetically generated peptide
  VARIANT (1)...(20): Xaa = Any Amino Acid
PGTCGEICAYXXXAACXTGC

SEQ ID NO: 4367 - protein, 20 aa, Artificial Sequence
  Synthetically generated peptide
  VARIANT (1)...(20): Xaa = Any Amino Acid
PGTCGEICAYXXXAACTXGC

SEQ ID NO: 4368 - protein, 20 aa, Artificial Sequence
  Synthetically generated peptide
  VARIANT (1)...(20): Xaa = Any Amino Acid
PGTCGEICAYXXXAACTGXC

SEQ ID NO: 4369 - protein, 20 aa, Artificial Sequence
  Synthetically generated peptide
  VARIANT (1)...(20): Xaa = Any Amino Acid
PGTCGEICAYXXXAACTGCX

SEQ ID NO: 4370 - protein, 19 aa, Artificial Sequence
  Synthetically generated peptide
  VARIANT (1)...(19): Xaa = Any Amino Acid
PGTCGEICAYXXAXACTGC

SEQ ID NO: 4371 - protein, 20 aa, Artificial Sequence
  Synthetically generated peptide
  VARIANT (1)...(20): Xaa = Any Amino Acid
PGTCGEICAYXXAXXACTGC

SEQ ID NO: 4372 - protein, 20 aa, Artificial Sequence
  Synthetically generated peptide
  VARIANT (1)...(20): Xaa = Any Amino Acid
PGTCGEICAYXXAXAXCTGC

SEQ ID NO: 4373 - protein, 20 aa, Artificial Sequence
  Synthetically generated peptide
  VARIANT (1)...(20): Xaa = Any Amino Acid
PGTCGEICAYXXAXACXTGC

SEQ ID NO: 4374 - protein, 20 aa, Artificial Sequence
  Synthetically generated peptide
  VARIANT (1)...(20): Xaa = Any Amino Acid
PGTCGEICAYXXAXACTXGC

SEQ ID NO: 4375 - protein, 20 aa, Artificial Sequence
  Synthetically generated peptide
  VARIANT (1)...(20): Xaa = Any Amino Acid
PGTCGEICAYXXAXACTGXC

SEQ ID NO: 4376 - protein, 20 aa, Artificial Sequence
  Synthetically generated peptide
  VARIANT (1)...(20): Xaa = Any Amino Acid
PGTCGEICAYXXAXACTGCX

SEQ ID NO: 4377 - protein, 19 aa, Artificial Sequence
  Synthetically generated peptide
  VARIANT (1)...(19): Xaa = Any Amino Acid
PGTCGEICAYXXAAXCTGC

SEQ ID NO: 4378 - protein, 20 aa, Artificial Sequence
  Synthetically generated peptide
  VARIANT (1)...(20): Xaa = Any Amino Acid
PGTCGEICAYXXAAXXCTGC

SEQ ID NO: 4379 - protein, 20 aa, Artificial Sequence
  Synthetically generated peptide
  VARIANT (1)...(20): Xaa = Any Amino Acid
PGTCGEICAYXXAAXCXTGC

SEQ ID NO: 4380 - protein, 20 aa, Artificial Sequence
  Synthetically generated peptide
  VARIANT (1)...(20): Xaa = Any Amino Acid
PGTCGEICAYXXAAXCTXGC

SEQ ID NO: 4381 - protein, 20 aa, Artificial Sequence
  Synthetically generated peptide
  VARIANT (1)...(20): Xaa = Any Amino Acid
PGTCGEICAYXXAAXCTGXC

SEQ ID NO: 4382 - protein, 20 aa, Artificial Sequence
  Synthetically generated peptide
  VARIANT (1)...(20): Xaa = Any Amino Acid
PGTCGEICAYXXAAXCTGCX

SEQ ID NO: 4383 - protein, 19 aa, Artificial Sequence
  Synthetically generated peptide
  VARIANT (1)...(19): Xaa = Any Amino Acid
PGTCGEICAYXXAACXTGC

SEQ ID NO: 4384 - protein, 20 aa, Artificial Sequence
  Synthetically generated peptide
  VARIANT (1)...(20): Xaa = Any Amino Acid
PGTCGEICAYXXAACXXTGC

SEQ ID NO: 4385 - protein, 20 aa, Artificial Sequence
  Synthetically generated peptide
  VARIANT (1)...(20): Xaa = Any Amino Acid
PGTCGEICAYXXAACXTXGC

SEQ ID NO: 4386 - protein, 20 aa, Artificial Sequence
  Synthetically generated peptide
  VARIANT (1)...(20): Xaa = Any Amino Acid
PGTCGEICAYXXAACXTGXC

SEQ ID NO: 4387 - protein, 20 aa, Artificial Sequence
  Synthetically generated peptide
  VARIANT (1)...(20): Xaa = Any Amino Acid
PGTCGEICAYXXAACXTGCX

SEQ ID NO: 4388 - protein, 19 aa, Artificial Sequence
  Synthetically generated peptide
  VARIANT (1)...(19): Xaa = Any Amino Acid
PGTCGEICAYXXAACTXGC

SEQ ID NO: 4389 - protein, 20 aa, Artificial Sequence
  Synthetically generated peptide
  VARIANT (1)...(20): Xaa = Any Amino Acid
PGTCGEICAYXXAACTXXGC

SEQ ID NO: 4390 - protein, 20 aa, Artificial Sequence
  Synthetically generated peptide
  VARIANT (1)...(20): Xaa = Any Amino Acid
PGTCGEICAYXXAACTXGXC

SEQ ID NO: 4391 - protein, 20 aa, Artificial Sequence
  Synthetically generated peptide
  VARIANT (1)...(20): Xaa = Any Amino Acid
PGTCGEICAYXXAACTXGCX

SEQ ID NO: 4392 - protein, 19 aa, Artificial Sequence
  Synthetically generated peptide
  VARIANT (1)...(19): Xaa = Any Amino Acid
PGTCGEICAYXXAACTGXC

SEQ ID NO: 4393 - protein, 20 aa, Artificial Sequence
  Synthetically generated peptide
  VARIANT (1)...(20): Xaa = Any Amino Acid
PGTCGEICAYXXAACTGXXC

SEQ ID NO: 4394 - protein, 20 aa, Artificial Sequence
  Synthetically generated peptide
  VARIANT (1)...(20): Xaa = Any Amino Acid
PGTCGEICAYXXAACTGXCX

SEQ ID NO: 4395 - protein, 19 aa, Artificial Sequence
  Synthetically generated peptide
  VARIANT (1)...(19): Xaa = Any Amino Acid
PGTCGEICAYXXAACTGCX

SEQ ID NO: 4396 - protein, 20 aa, Artificial Sequence
  Synthetically generated peptide
  VARIANT (1)...(20): Xaa = Any Amino Acid
PGTCGEICAYXXAACTGCXX

SEQ ID NO: 4397 - protein, 18 aa, Artificial Sequence
  Synthetically generated peptide
  VARIANT (1)...(18): Xaa = Any Amino Acid
PGTCGEICAYXAXACTGC

SEQ ID NO: 4398 - protein, 19 aa, Artificial Sequence
  Synthetically generated peptide
  VARIANT (1)...(19): Xaa = Any Amino Acid
PGTCGEICAYXAXXACTGC

SEQ ID NO: 4399 - protein, 20 aa, Artificial Sequence
  Synthetically generated peptide
  VARIANT (1)...(20): Xaa = Any Amino Acid
PGTCGEICAYXAXXXACTGC

SEQ ID NO: 4400 - protein, 20 aa, Artificial Sequence
  Synthetically generated peptide
  VARIANT (1)...(20): Xaa = Any Amino Acid
PGTCGEICAYXAXXAXCTGC

SEQ ID NO: 4401 - protein, 20 aa, Artificial Sequence
  Synthetically generated peptide
  VARIANT (1)...(20): Xaa = Any Amino Acid
PGTCGEICAYXAXXACXTGC

SEQ ID NO: 4402 - protein, 20 aa, Artificial Sequence
  Synthetically generated peptide
  VARIANT (1)...(20): Xaa = Any Amino Acid
PGTCGEICAYXAXXACTXGC

SEQ ID NO: 4403 - protein, 20 aa, Artificial Sequence
  Synthetically generated peptide
  VARIANT (1)...(20): Xaa = Any Amino Acid
PGTCGEICAYXAXXACTGXC

SEQ ID NO: 4404 - protein, 20 aa, Artificial Sequence
  Synthetically generated peptide
  VARIANT (1)...(20): Xaa = Any Amino Acid
PGTCGEICAYXAXXACTGCX

SEQ ID NO: 4405 - protein, 19 aa, Artificial Sequence
  Synthetically generated peptide
  VARIANT (1)...(19): Xaa = Any Amino Acid
PGTCGEICAYXAXAXCTGC

SEQ ID NO: 4406 - protein, 20 aa, Artificial Sequence
  Synthetically generated peptide
  VARIANT (1)...(20): Xaa = Any Amino Acid
PGTCGEICAYXAXAXXCTGC

SEQ ID NO: 4407 - protein, 20 aa, Artificial Sequence
  Synthetically generated peptide
  VARIANT (1)...(20): Xaa = Any Amino Acid
PGTCGEICAYXAXAXCXTGC

SEQ ID NO: 4408 - protein, 20 aa, Artificial Sequence
  Synthetically generated peptide
  VARIANT (1)...(20): Xaa = Any Amino Acid
PGTCGEICAYXAXAXCTXGC

SEQ ID NO: 4409 - protein, 20 aa, Artificial Sequence
  Synthetically generated peptide
  VARIANT (1)...(20): Xaa = Any Amino Acid
PGTCGEICAYXAXAXCTGXC

SEQ ID NO: 4410 - protein, 20 aa, Artificial Sequence
  Synthetically generated peptide
  VARIANT (1)...(20): Xaa = Any Amino Acid
PGTCGEICAYXAXAXCTGCX

SEQ ID NO: 4411 - protein, 19 aa, Artificial Sequence
  Synthetically generated peptide
  VARIANT (1)...(19): Xaa = Any Amino Acid
PGTCGEICAYXAXACXTGC

SEQ ID NO: 4412 - protein, 20 aa, Artificial Sequence
  Synthetically generated peptide
  VARIANT (1)...(20): Xaa = Any Amino Acid
PGTCGEICAYXAXACXXTGC

SEQ ID NO: 4413 - protein, 20 aa, Artificial Sequence
  Synthetically generated peptide
  VARIANT (1)...(20): Xaa = Any Amino Acid
PGTCGEICAYXAXACXTXGC

SEQ ID NO: 4414 - protein, 20 aa, Artificial Sequence
  Synthetically generated peptide
  VARIANT (1)...(20): Xaa = Any Amino Acid
PGTCGEICAYXAXACXTGXC

SEQ ID NO: 4415 - protein, 20 aa, Artificial Sequence
  Synthetically generated peptide
  VARIANT (1)...(20): Xaa = Any Amino Acid
PGTCGEICAYXAXACXTGCX

SEQ ID NO: 4416 - protein, 19 aa, Artificial Sequence
  Synthetically generated peptide
  VARIANT (1)...(19): Xaa = Any Amino Acid
PGTCGEICAYXAXACTXGC

SEQ ID NO: 4417 - protein, 20 aa, Artificial Sequence
  Synthetically generated peptide
  VARIANT (1)...(20): Xaa = Any Amino Acid
PGTCGEICAYXAXACTXXGC

SEQ ID NO: 4418 - protein, 20 aa, Artificial Sequence
  Synthetically generated peptide
  VARIANT (1)...(20): Xaa = Any Amino Acid
PGTCGEICAYXAXACTXGXC

SEQ ID NO: 4419 - protein, 20 aa, Artificial Sequence
  Synthetically generated peptide
  VARIANT (1)...(20): Xaa = Any Amino Acid
PGTCGEICAYXAXACTXGCX

SEQ ID NO: 4420 - protein, 19 aa, Artificial Sequence
  Synthetically generated peptide
  VARIANT (1)...(19): Xaa = Any Amino Acid
PGTCGEICAYXAXACTGXC

SEQ ID NO: 4421 - protein, 20 aa, Artificial Sequence
  Synthetically generated peptide
  VARIANT (1)...(20): Xaa = Any Amino Acid
PGTCGEICAYXAXACTGXXC

SEQ ID NO: 4422 - protein, 20 aa, Artificial Sequence
  Synthetically generated peptide
  VARIANT (1)...(20): Xaa = Any Amino Acid
PGTCGEICAYXAXACTGXCX

SEQ ID NO: 4423 - protein, 19 aa, Artificial Sequence
  Synthetically generated peptide
  VARIANT (1)...(19): Xaa = Any Amino Acid
PGTCGEICAYXAXACTGCX

SEQ ID NO: 4424 - protein, 20 aa, Artificial Sequence
  Synthetically generated peptide
  VARIANT (1)...(20): Xaa = Any Amino Acid
PGTCGEICAYXAXACTGCXX

SEQ ID NO: 4425 - protein, 18 aa, Artificial Sequence
  Synthetically generated peptide
  VARIANT (1)...(18): Xaa = Any Amino Acid
PGTCGEICAYXAAXCTGC

SEQ ID NO: 4426 - protein, 19 aa, Artificial Sequence
  Synthetically generated peptide
  VARIANT (1)...(19): Xaa = Any Amino Acid
PGTCGEICAYXAAXXCTGC

SEQ ID NO: 4427 - protein, 20 aa, Artificial Sequence
  Synthetically generated peptide
  VARIANT (1)...(20): Xaa = Any Amino Acid
PGTCGEICAYXAAXXXCTGC

SEQ ID NO: 4428 - protein, 20 aa, Artificial Sequence
  Synthetically generated peptide
  VARIANT (1)...(20): Xaa = Any Amino Acid
PGTCGEICAYXAAXXCXTGC

SEQ ID NO: 4429 - protein, 20 aa, Artificial Sequence
  Synthetically generated peptide
  VARIANT (1)...(20): Xaa = Any Amino Acid
PGTCGEICAYXAAXXCTXGC

SEQ ID NO: 4430 - protein, 20 aa, Artificial Sequence
  Synthetically generated peptide
  VARIANT (1)...(20): Xaa = Any Amino Acid
PGTCGEICAYXAAXXCTGXC

SEQ ID NO: 4431 - protein, 20 aa, Artificial Sequence
  Synthetically generated peptide
  VARIANT (1)...(20): Xaa = Any Amino Acid
PGTCGEICAYXAAXXCTGCX

SEQ ID NO: 4432 - protein, 19 aa, Artificial Sequence
  Synthetically generated peptide
  VARIANT (1)...(19): Xaa = Any Amino Acid
PGTCGEICAYXAAXCXTGC

SEQ ID NO: 4433 - protein, 20 aa, Artificial Sequence
  Synthetically generated peptide
  VARIANT (1)...(20): Xaa = Any Amino Acid
PGTCGEICAYXAAXCXXTGC

SEQ ID NO: 4434 - protein, 20 aa, Artificial Sequence
  Synthetically generated peptide
  VARIANT (1)...(20): Xaa = Any Amino Acid
PGTCGEICAYXAAXCXTXGC

SEQ ID NO: 4435 - protein, 20 aa, Artificial Sequence
  Synthetically generated peptide
  VARIANT (1)...(20): Xaa = Any Amino Acid
PGTCGEICAYXAAXCXTGXC

SEQ ID NO: 4436 - protein, 20 aa, Artificial Sequence
  Synthetically generated peptide
  VARIANT (1)...(20): Xaa = Any Amino Acid
PGTCGEICAYXAAXCXTGCX

SEQ ID NO: 4437 - protein, 19 aa, Artificial Sequence
  Synthetically generated peptide
  VARIANT (1)...(19): Xaa = Any Amino Acid
PGTCGEICAYXAAXCTXGC

SEQ ID NO: 4438 - protein, 20 aa, Artificial Sequence
  Synthetically generated peptide
  VARIANT (1)...(20): Xaa = Any Amino Acid
PGTCGEICAYXAAXCTXXGC

SEQ ID NO: 4439 - protein, 20 aa, Artificial Sequence
  Synthetically generated peptide
  VARIANT (1)...(20): Xaa = Any Amino Acid
PGTCGEICAYXAAXCTXGXC

SEQ ID NO: 4440 - protein, 20 aa, Artificial Sequence
  Synthetically generated peptide
  VARIANT (1)...(20): Xaa = Any Amino Acid
PGTCGEICAYXAAXCTXGCX

SEQ ID NO: 4441 - protein, 19 aa, Artificial Sequence
  Synthetically generated peptide
  VARIANT (1)...(19): Xaa = Any Amino Acid
PGTCGEICAYXAAXCTGXC

SEQ ID NO: 4442 - protein, 20 aa, Artificial Sequence
  Synthetically generated peptide
  VARIANT (1)...(20): Xaa = Any Amino Acid
PGTCGEICAYXAAXCTGXXC

SEQ ID NO: 4443 - protein, 20 aa, Artificial Sequence
  Synthetically generated peptide
  VARIANT (1)...(20): Xaa = Any Amino Acid
PGTCGEICAYXAAXCTGXCX

SEQ ID NO: 4444 - protein, 19 aa, Artificial Sequence
  Synthetically generated peptide
  VARIANT (1)...(19): Xaa = Any Amino Acid
PGTCGEICAYXAAXCTGCX

SEQ ID NO: 4445 - protein, 20 aa, Artificial Sequence
  Synthetically generated peptide
  VARIANT (1)...(20): Xaa = Any Amino Acid
PGTCGEICAYXAAXCTGCXX

SEQ ID NO: 4446 - protein, 18 aa, Artificial Sequence
  Synthetically generated peptide
  VARIANT (1)...(18): Xaa = Any Amino Acid
PGTCGEICAYXAACXTGC

SEQ ID NO: 4447 - protein, 19 aa, Artificial Sequence
  Synthetically generated peptide
  VARIANT (1)...(19): Xaa = Any Amino Acid
PGTCGEICAYXAACXXTGC

SEQ ID NO: 4448 - protein, 20 aa, Artificial Sequence
  Synthetically generated peptide
  VARIANT (1)...(20): Xaa = Any Amino Acid
PGTCGEICAYXAACXXXTGC

SEQ ID NO: 4449 - protein, 20 aa, Artificial Sequence
  Synthetically generated peptide
  VARIANT (1)...(20): Xaa = Any Amino Acid
PGTCGEICAYXAACXXTXGC

SEQ ID NO: 4450 - protein, 20 aa, Artificial Sequence
  Synthetically generated peptide
  VARIANT (1)...(20): Xaa = Any Amino Acid
PGTCGEICAYXAACXXTGXC

SEQ ID NO: 4451 - protein, 20 aa, Artificial Sequence
  Synthetically generated peptide
  VARIANT (1)...(20): Xaa = Any Amino Acid
PGTCGEICAYXAACXXTGCX

SEQ ID NO: 4452 - protein, 19 aa, Artificial Sequence
  Synthetically generated peptide
  VARIANT (1)...(19): Xaa = Any Amino Acid
PGTCGEICAYXAACXTXGC

SEQ ID NO: 4453 - protein, 20 aa, Artificial Sequence
  Synthetically generated peptide
  VARIANT (1)...(20): Xaa = Any Amino Acid
PGTCGEICAYXAACXTXXGC

SEQ ID NO: 4454 - protein, 20 aa, Artificial Sequence
  Synthetically generated peptide
  VARIANT (1)...(20): Xaa = Any Amino Acid
PGTCGEICAYXAACXTXGXC

SEQ ID NO: 4455 - protein, 20 aa, Artificial Sequence
  Synthetically generated peptide
  VARIANT (1)...(20): Xaa = Any Amino Acid
PGTCGEICAYXAACXTXGCX

SEQ ID NO: 4456 - protein, 19 aa, Artificial Sequence
  Synthetically generated peptide
  VARIANT (1)...(19): Xaa = Any Amino Acid
PGTCGEICAYXAACXTGXC

SEQ ID NO: 4457 - protein, 20 aa, Artificial Sequence
  Synthetically generated peptide
  VARIANT (1)...(20): Xaa = Any Amino Acid
PGTCGEICAYXAACXTGXXC

SEQ ID NO: 4458 - protein, 20 aa, Artificial Sequence
  Synthetically generated peptide
  VARIANT (1)...(20): Xaa = Any Amino Acid
PGTCGEICAYXAACXTGXCX

SEQ ID NO: 4459 - protein, 19 aa, Artificial Sequence
  Synthetically generated peptide
  VARIANT (1)...(19): Xaa = Any Amino Acid
PGTCGEICAYXAACXTGCX

SEQ ID NO: 4460 - protein, 20 aa, Artificial Sequence
  Synthetically generated peptide
  VARIANT (1)...(20): Xaa = Any Amino Acid
PGTCGEICAYXAACXTGCXX

SEQ ID NO: 4461 - protein, 18 aa, Artificial Sequence
  Synthetically generated peptide
  VARIANT (1)...(18): Xaa = Any Amino Acid
PGTCGEICAYXAACTXGC

SEQ ID NO: 4462 - protein, 19 aa, Artificial Sequence
  Synthetically generated peptide
  VARIANT (1)...(19): Xaa = Any Amino Acid
PGTCGEICAYXAACTXXGC

SEQ ID NO: 4463 - protein, 20 aa, Artificial Sequence
  Synthetically generated peptide
  VARIANT (1)...(20): Xaa = Any Amino Acid
PGTCGEICAYXAACTXXXGC

SEQ ID NO: 4464 - protein, 20 aa, Artificial Sequence
  Synthetically generated peptide
  VARIANT (1)...(20): Xaa = Any Amino Acid
PGTCGEICAYXAACTXXGXC

SEQ ID NO: 4465 - protein, 20 aa, Artificial Sequence
  Synthetically generated peptide
  VARIANT (1)...(20): Xaa = Any Amino Acid
PGTCGEICAYXAACTXXGCX

SEQ ID NO: 4466 - protein, 19 aa, Artificial Sequence
  Synthetically generated peptide
  VARIANT (1)...(19): Xaa = Any Amino Acid
PGTCGEICAYXAACTXGXC

SEQ ID NO: 4467 - protein, 20 aa, Artificial Sequence
  Synthetically generated peptide
  VARIANT (1)...(20): Xaa = Any Amino Acid
PGTCGEICAYXAACTXGXXC

SEQ ID NO: 4468 - protein, 20 aa, Artificial Sequence
  Synthetically generated peptide
  VARIANT (1)...(20): Xaa = Any Amino Acid
PGTCGEICAYXAACTXGXCX

SEQ ID NO: 4469 - protein, 19 aa, Artificial Sequence
  Synthetically generated peptide
  VARIANT (1)...(19): Xaa = Any Amino Acid
PGTCGEICAYXAACTXGCX

SEQ ID NO: 4470 - protein, 20 aa, Artificial Sequence
  Synthetically generated peptide
  VARIANT (1)...(20): Xaa = Any Amino Acid
PGTCGEICAYXAACTXGCXX

SEQ ID NO: 4471 - protein, 18 aa, Artificial Sequence
  Synthetically generated peptide
  VARIANT (1)...(18): Xaa = Any Amino Acid
PGTCGEICAYXAACTGXC

SEQ ID NO: 4472 - protein, 19 aa, Artificial Sequence
  Synthetically generated peptide
  VARIANT (1)...(19): Xaa = Any Amino Acid
PGTCGEICAYXAACTGXXC

SEQ ID NO: 4473 - protein, 20 aa, Artificial Sequence
  Synthetically generated peptide
  VARIANT (1)...(20): Xaa = Any Amino Acid
PGTCGEICAYXAACTGXXXC

SEQ ID NO: 4474 - protein, 20 aa, Artificial Sequence
  Synthetically generated peptide
  VARIANT (1)...(20): Xaa = Any Amino Acid
PGTCGEICAYXAACTGXXCX

SEQ ID NO: 4475 - protein, 19 aa, Artificial Sequence
  Synthetically generated peptide
  VARIANT (1)...(19): Xaa = Any Amino Acid
PGTCGEICAYXAACTGXCX

SEQ ID NO: 4476 - protein, 20 aa, Artificial Sequence
  Synthetically generated peptide
  VARIANT (1)...(20): Xaa = Any Amino Acid
PGTCGEICAYXAACTGXCXX

SEQ ID NO: 4477 - protein, 18 aa, Artificial Sequence
  Synthetically generated peptide
  VARIANT (1)...(18): Xaa = Any Amino Acid
PGTCGEICAYXAACTGCX

SEQ ID NO: 4478 - protein, 19 aa, Artificial Sequence
  Synthetically generated peptide
  VARIANT (1)...(19): Xaa = Any Amino Acid
PGTCGEICAYXAACTGCXX

SEQ ID NO: 4479 - protein, 20 aa, Artificial Sequence
  Synthetically generated peptide
  VARIANT (1)...(20): Xaa = Any Amino Acid
PGTCGEICAYXAACTGCXXX

SEQ ID NO: 4480 - protein, 17 aa, Artificial Sequence
  Synthetically generated peptide
  VARIANT (1)...(17): Xaa = Any Amino Acid
PGTCGEICAYAXACTGC

SEQ ID NO: 4481 - protein, 18 aa, Artificial Sequence
  Synthetically generated peptide
  VARIANT (1)...(18): Xaa = Any Amino Acid
PGTCGEICAYAXXACTGC

SEQ ID NO: 4482 - protein, 19 aa, Artificial Sequence
  Synthetically generated peptide
  VARIANT (1)...(19): Xaa = Any Amino Acid
PGTCGEICAYAXXXACTGC

SEQ ID NO: 4483 - protein, 20 aa, Artificial Sequence
  Synthetically generated peptide
  VARIANT (1)...(20): Xaa = Any Amino Acid
PGTCGEICAYAXXXXACTGC

SEQ ID NO: 4484 - protein, 20 aa, Artificial Sequence
  Synthetically generated peptide
  VARIANT (1)...(20): Xaa = Any Amino Acid
PGTCGEICAYAXXXAXCTGC

SEQ ID NO: 4485 - protein, 20 aa, Artificial Sequence
  Synthetically generated peptide
  VARIANT (1)...(20): Xaa = Any Amino Acid
PGTCGEICAYAXXXACXTGC

SEQ ID NO: 4486 - protein, 20 aa, Artificial Sequence
  Synthetically generated peptide
  VARIANT (1)...(20): Xaa = Any Amino Acid
PGTCGEICAYAXXXACTXGC

SEQ ID NO: 4487 - protein, 20 aa, Artificial Sequence
  Synthetically generated peptide
  VARIANT (1)...(20): Xaa = Any Amino Acid
PGTCGEICAYAXXXACTGXC

SEQ ID NO: 4488 - protein, 20 aa, Artificial Sequence
  Synthetically generated peptide
  VARIANT (1)...(20): Xaa = Any Amino Acid
PGTCGEICAYAXXXACTGCX

SEQ ID NO: 4489 - protein, 19 aa, Artificial Sequence
  Synthetically generated peptide
  VARIANT (1)...(19): Xaa = Any Amino Acid
PGTCGEICAYAXXAXCTGC

SEQ ID NO: 4490 - protein, 20 aa, Artificial Sequence
  Synthetically generated peptide
  VARIANT (1)...(20): Xaa = Any Amino Acid
PGTCGEICAYAXXAXXCTGC

SEQ ID NO: 4491 - protein, 20 aa, Artificial Sequence
  Synthetically generated peptide
  VARIANT (1)...(20): Xaa = Any Amino Acid
PGTCGEICAYAXXAXCXTGC

SEQ ID NO: 4492 - protein, 20 aa, Artificial Sequence
  Synthetically generated peptide
  VARIANT (1)...(20): Xaa = Any Amino Acid
PGTCGEICAYAXXAXCTXGC

SEQ ID NO: 4493 - protein, 20 aa, Artificial Sequence
  Synthetically generated peptide
  VARIANT (1)...(20): Xaa = Any Amino Acid
PGTCGEICAYAXXAXCTGXC

SEQ ID NO: 4494 - protein, 20 aa, Artificial Sequence
  Synthetically generated peptide
  VARIANT (1)...(20): Xaa = Any Amino Acid
PGTCGEICAYAXXAXCTGCX

SEQ ID NO: 4495 - protein, 19 aa, Artificial Sequence
  Synthetically generated peptide
  VARIANT (1)...(19): Xaa = Any Amino Acid
PGTCGEICAYAXXACXTGC

SEQ ID NO: 4496 - protein, 20 aa, Artificial Sequence
  Synthetically generated peptide
  VARIANT (1)...(20): Xaa = Any Amino Acid
PGTCGEICAYAXXACXXTGC

SEQ ID NO: 4497 - protein, 20 aa, Artificial Sequence
  Synthetically generated peptide
  VARIANT (1)...(20): Xaa = Any Amino Acid
PGTCGEICAYAXXACXTXGC

SEQ ID NO: 4498 - protein, 20 aa, Artificial Sequence
  Synthetically generated peptide
  VARIANT (1)...(20): Xaa = Any Amino Acid
PGTCGEICAYAXXACXTGXC

SEQ ID NO: 4499 - protein, 20 aa, Artificial Sequence
  Synthetically generated peptide
  VARIANT (1)...(20): Xaa = Any Amino Acid
PGTCGEICAYAXXACXTGCX

SEQ ID NO: 4500 - protein, 19 aa, Artificial Sequence
  Synthetically generated peptide
  VARIANT (1)...(19): Xaa = Any Amino Acid
PGTCGEICAYAXXACTXGC

SEQ ID NO: 4501 - protein, 20 aa, Artificial Sequence
  Synthetically generated peptide
  VARIANT (1)...(20): Xaa = Any Amino Acid
PGTCGEICAYAXXACTXXGC

SEQ ID NO: 4502 - protein, 20 aa, Artificial Sequence
  Synthetically generated peptide
  VARIANT (1)...(20): Xaa = Any Amino Acid
PGTCGEICAYAXXACTXGXC

SEQ ID NO: 4503 - protein, 20 aa, Artificial Sequence
  Synthetically generated peptide
  VARIANT (1)...(20): Xaa = Any Amino Acid
PGTCGEICAYAXXACTXGCX

SEQ ID NO: 4504 - protein, 19 aa, Artificial Sequence
  Synthetically generated peptide
  VARIANT (1)...(19): Xaa = Any Amino Acid
PGTCGEICAYAXXACTGXC

SEQ ID NO: 4505 - protein, 20 aa, Artificial Sequence
  Synthetically generated peptide
  VARIANT (1)...(20): Xaa = Any Amino Acid
PGTCGEICAYAXXACTGXXC

SEQ ID NO: 4506 - protein, 20 aa, Artificial Sequence
  Synthetically generated peptide
  VARIANT (1)...(20): Xaa = Any Amino Acid
PGTCGEICAYAXXACTGXCX

SEQ ID NO: 4507 - protein, 19 aa, Artificial Sequence
  Synthetically generated peptide
  VARIANT (1)...(19): Xaa = Any Amino Acid
PGTCGEICAYAXXACTGCX

SEQ ID NO: 4508 - protein, 20 aa, Artificial Sequence
  Synthetically generated peptide
  VARIANT (1)...(20): Xaa = Any Amino Acid
PGTCGEICAYAXXACTGCXX

SEQ ID NO: 4509 - protein, 18 aa, Artificial Sequence
  Synthetically generated peptide
  VARIANT (1)...(18): Xaa = Any Amino Acid
PGTCGEICAYAXAXCTGC

SEQ ID NO: 4510 - protein, 19 aa, Artificial Sequence
  Synthetically generated peptide
  VARIANT (1)...(19): Xaa = Any Amino Acid
PGTCGEICAYAXAXXCTGC

SEQ ID NO: 4511 - protein, 20 aa, Artificial Sequence
  Synthetically generated peptide
  VARIANT (1)...(20): Xaa = Any Amino Acid
PGTCGEICAYAXAXXXCTGC

SEQ ID NO: 4512 - protein, 20 aa, Artificial Sequence
  Synthetically generated peptide
  VARIANT (1)...(20): Xaa = Any Amino Acid
PGTCGEICAYAXAXXCXTGC

SEQ ID NO: 4513 - protein, 20 aa, Artificial Sequence
  Synthetically generated peptide
  VARIANT (1)...(20): Xaa = Any Amino Acid
PGTCGEICAYAXAXXCTXGC

SEQ ID NO: 4514 - protein, 20 aa, Artificial Sequence
  Synthetically generated peptide
  VARIANT (1)...(20): Xaa = Any Amino Acid
PGTCGEICAYAXAXXCTGXC

SEQ ID NO: 4515 - protein, 20 aa, Artificial Sequence
  Synthetically generated peptide
  VARIANT (1)...(20): Xaa = Any Amino Acid
PGTCGEICAYAXAXXCTGCX

SEQ ID NO: 4516 - protein, 19 aa, Artificial Sequence
  Synthetically generated peptide
  VARIANT (1)...(19): Xaa = Any Amino Acid
PGTCGEICAYAXAXCXTGC

SEQ ID NO: 4517 - protein, 20 aa, Artificial Sequence
  Synthetically generated peptide
  VARIANT (1)...(20): Xaa = Any Amino Acid
PGTCGEICAYAXAXCXXTGC

SEQ ID NO: 4518 - protein, 20 aa, Artificial Sequence
  Synthetically generated peptide
  VARIANT (1)...(20): Xaa = Any Amino Acid
PGTCGEICAYAXAXCXTXGC

SEQ ID NO: 4519 - protein, 20 aa, Artificial Sequence
  Synthetically generated peptide
  VARIANT (1)...(20): Xaa = Any Amino Acid
PGTCGEICAYAXAXCXTGXC

SEQ ID NO: 4520 - protein, 20 aa, Artificial Sequence
  Synthetically generated peptide
  VARIANT (1)...(20): Xaa = Any Amino Acid
PGTCGEICAYAXAXCXTGCX

SEQ ID NO: 4521 - protein, 19 aa, Artificial Sequence
  Synthetically generated peptide
  VARIANT (1)...(19): Xaa = Any Amino Acid
PGTCGEICAYAXAXCTXGC

SEQ ID NO: 4522 - protein, 20 aa, Artificial Sequence
  Synthetically generated peptide
  VARIANT (1)...(20): Xaa = Any Amino Acid
PGTCGEICAYAXAXCTXXGC

SEQ ID NO: 4523 - protein, 20 aa, Artificial Sequence
  Synthetically generated peptide
  VARIANT (1)...(20): Xaa = Any Amino Acid
PGTCGEICAYAXAXCTXGXC

SEQ ID NO: 4524 - protein, 20 aa, Artificial Sequence
  Synthetically generated peptide
  VARIANT (1)...(20): Xaa = Any Amino Acid
PGTCGEICAYAXAXCTXGCX

SEQ ID NO: 4525 - protein, 19 aa, Artificial Sequence
  Synthetically generated peptide
  VARIANT (1)...(19): Xaa = Any Amino Acid
PGTCGEICAYAXAXCTGXC

SEQ ID NO: 4526 - protein, 20 aa, Artificial Sequence
  Synthetically generated peptide
  VARIANT (1)...(20): Xaa = Any Amino Acid
PGTCGEICAYAXAXCTGXXC

SEQ ID NO: 4527 - protein, 20 aa, Artificial Sequence
  Synthetically generated peptide
  VARIANT (1)...(20): Xaa = Any Amino Acid
PGTCGEICAYAXAXCTGXCX

SEQ ID NO: 4528 - protein, 19 aa, Artificial Sequence
  Synthetically generated peptide
  VARIANT (1)...(19): Xaa = Any Amino Acid
PGTCGEICAYAXAXCTGCX

SEQ ID NO: 4529 - protein, 20 aa, Artificial Sequence
  Synthetically generated peptide
  VARIANT (1)...(20): Xaa = Any Amino Acid
PGTCGEICAYAXAXCTGCXX

SEQ ID NO: 4530 - protein, 18 aa, Artificial Sequence
  Synthetically generated peptide
  VARIANT (1)...(18): Xaa = Any Amino Acid
PGTCGEICAYAXACXTGC

SEQ ID NO: 4531 - protein, 19 aa, Artificial Sequence
  Synthetically generated peptide
  VARIANT (1)...(19): Xaa = Any Amino Acid
PGTCGEICAYAXACXXTGC

SEQ ID NO: 4532 - protein, 20 aa, Artificial Sequence
  Synthetically generated peptide
  VARIANT (1)...(20): Xaa = Any Amino Acid
PGTCGEICAYAXACXXXTGC

SEQ ID NO: 4533 - protein, 20 aa, Artificial Sequence
  Synthetically generated peptide
  VARIANT (1)...(20): Xaa = Any Amino Acid
PGTCGEICAYAXACXXTXGC

SEQ ID NO: 4534 - protein, 20 aa, Artificial Sequence
  Synthetically generated peptide
  VARIANT (1)...(20): Xaa = Any Amino Acid
PGTCGEICAYAXACXXTGXC

SEQ ID NO: 4535 - protein, 20 aa, Artificial Sequence
  Synthetically generated peptide
  VARIANT (1)...(20): Xaa = Any Amino Acid
PGTCGEICAYAXACXXTGCX

SEQ ID NO: 4536 - protein, 19 aa, Artificial Sequence
  Synthetically generated peptide
  VARIANT (1)...(19): Xaa = Any Amino Acid
PGTCGEICAYAXACXTXGC

SEQ ID NO: 4537 - protein, 20 aa, Artificial Sequence
  Synthetically generated peptide
  VARIANT (1)...(20): Xaa = Any Amino Acid
PGTCGEICAYAXACXTXXGC

SEQ ID NO: 4538 - protein, 20 aa, Artificial Sequence
  Synthetically generated peptide
  VARIANT (1)...(20): Xaa = Any Amino Acid
PGTCGEICAYAXACXTXGXC

SEQ ID NO: 4539 - protein, 20 aa, Artificial Sequence
  Synthetically generated peptide
  VARIANT (1)...(20): Xaa = Any Amino Acid
PGTCGEICAYAXACXTXGCX

SEQ ID NO: 4540 - protein, 19 aa, Artificial Sequence
  Synthetically generated peptide
  VARIANT (1)...(19): Xaa = Any Amino Acid
PGTCGEICAYAXACXTGXC

SEQ ID NO: 4541 - protein, 20 aa, Artificial Sequence
  Synthetically generated peptide
  VARIANT (1)...(20): Xaa = Any Amino Acid
PGTCGEICAYAXACXTGXXC

SEQ ID NO: 4542 - protein, 20 aa, Artificial Sequence
  Synthetically generated peptide
  VARIANT (1)...(20): Xaa = Any Amino Acid
PGTCGEICAYAXACXTGXCX

SEQ ID NO: 4543 - protein, 19 aa, Artificial Sequence
  Synthetically generated peptide
  VARIANT (1)...(19): Xaa = Any Amino Acid
PGTCGEICAYAXACXTGCX

SEQ ID NO: 4544 - protein, 20 aa, Artificial Sequence
  Synthetically generated peptide
  VARIANT (1)...(20): Xaa = Any Amino Acid
PGTCGEICAYAXACXTGCXX

SEQ ID NO: 4545 - protein, 18 aa, Artificial Sequence
  Synthetically generated peptide
  VARIANT (1)...(18): Xaa = Any Amino Acid
PGTCGEICAYAXACTXGC

SEQ ID NO: 4546 - protein, 19 aa, Artificial Sequence
  Synthetically generated peptide
  VARIANT (1)...(19): Xaa = Any Amino Acid
PGTCGEICAYAXACTXXGC

SEQ ID NO: 4547 - protein, 20 aa, Artificial Sequence
  Synthetically generated peptide
  VARIANT (1)...(20): Xaa = Any Amino Acid
PGTCGEICAYAXACTXXXGC

SEQ ID NO: 4548 - protein, 20 aa, Artificial Sequence
  Synthetically generated peptide
  VARIANT (1)...(20): Xaa = Any Amino Acid
PGTCGEICAYAXACTXXGXC

SEQ ID NO: 4549 - protein, 20 aa, Artificial Sequence
  Synthetically generated peptide
  VARIANT (1)...(20): Xaa = Any Amino Acid
PGTCGEICAYAXACTXXGCX

SEQ ID NO: 4550 - protein, 19 aa, Artificial Sequence
  Synthetically generated peptide
  VARIANT (1)...(19): Xaa = Any Amino Acid
PGTCGEICAYAXACTXGXC

SEQ ID NO: 4551 - protein, 20 aa, Artificial Sequence
  Synthetically generated peptide
  VARIANT (1)...(20): Xaa = Any Amino Acid
PGTCGEICAYAXACTXGXXC

SEQ ID NO: 4552 - protein, 20 aa, Artificial Sequence
  Synthetically generated peptide
  VARIANT (1)...(20): Xaa = Any Amino Acid
PGTCGEICAYAXACTXGXCX

SEQ ID NO: 4553 - protein, 19 aa, Artificial Sequence
  Synthetically generated peptide
  VARIANT (1)...(19): Xaa = Any Amino Acid
PGTCGEICAYAXACTXGCX

SEQ ID NO: 4554 - protein, 20 aa, Artificial Sequence
  Synthetically generated peptide
  VARIANT (1)...(20): Xaa = Any Amino Acid
PGTCGEICAYAXACTXGCXX

SEQ ID NO: 4555 - protein, 18 aa, Artificial Sequence
  Synthetically generated peptide
  VARIANT (1)...(18): Xaa = Any Amino Acid
PGTCGEICAYAXACTGXC

SEQ ID NO: 4556 - protein, 19 aa, Artificial Sequence
  Synthetically generated peptide
  VARIANT (1)...(19): Xaa = Any Amino Acid
PGTCGEICAYAXACTGXXC

SEQ ID NO: 4557 - protein, 20 aa, Artificial Sequence
  Synthetically generated peptide
  VARIANT (1)...(20): Xaa = Any Amino Acid
PGTCGEICAYAXACTGXXXC

SEQ ID NO: 4558 - protein, 20 aa, Artificial Sequence
  Synthetically generated peptide
  VARIANT (1)...(20): Xaa = Any Amino Acid
PGTCGEICAYAXACTGXXCX

SEQ ID NO: 4559 - protein, 19 aa, Artificial Sequence
  Synthetically generated peptide
  VARIANT (1)...(19): Xaa = Any Amino Acid
PGTCGEICAYAXACTGXCX

SEQ ID NO: 4560 - protein, 20 aa, Artificial Sequence
  Synthetically generated peptide
  VARIANT (1)...(20): Xaa = Any Amino Acid
PGTCGEICAYAXACTGXCXX

SEQ ID NO: 4561 - protein, 18 aa, Artificial Sequence
  Synthetically generated peptide
  VARIANT (1)...(18): Xaa = Any Amino Acid
PGTCGEICAYAXACTGCX

SEQ ID NO: 4562 - protein, 19 aa, Artificial Sequence
  Synthetically generated peptide
  VARIANT (1)...(19): Xaa = Any Amino Acid
PGTCGEICAYAXACTGCXX

SEQ ID NO: 4563 - protein, 20 aa, Artificial Sequence
  Synthetically generated peptide
  VARIANT (1)...(20): Xaa = Any Amino Acid
PGTCGEICAYAXACTGCXXX

SEQ ID NO: 4564 - protein, 17 aa, Artificial Sequence
  Synthetically generated peptide
  VARIANT (1)...(17): Xaa = Any Amino Acid
PGTCGEICAYAAXCTGC

SEQ ID NO: 4565 - protein, 18 aa, Artificial Sequence
  Synthetically generated peptide
  VARIANT (1)...(18): Xaa = Any Amino Acid
PGTCGEICAYAAXXCTGC

SEQ ID NO: 4566 - protein, 19 aa, Artificial Sequence
  Synthetically generated peptide
  VARIANT (1)...(19): Xaa = Any Amino Acid
PGTCGEICAYAAXXXCTGC

SEQ ID NO: 4567 - protein, 20 aa, Artificial Sequence
  Synthetically generated peptide
  VARIANT (1)...(20): Xaa = Any Amino Acid
PGTCGEICAYAAXXXXCTGC

SEQ ID NO: 4568 - protein, 20 aa, Artificial Sequence
  Synthetically generated peptide
  VARIANT (1)...(20): Xaa = Any Amino Acid
PGTCGEICAYAAXXXCXTGC

SEQ ID NO: 4569 - protein, 20 aa, Artificial Sequence
  Synthetically generated peptide
  VARIANT (1)...(20): Xaa = Any Amino Acid
PGTCGEICAYAAXXXCTXGC

SEQ ID NO: 4570 - protein, 20 aa, Artificial Sequence
  Synthetically generated peptide
  VARIANT (1)...(20): Xaa = Any Amino Acid
PGTCGEICAYAAXXXCTGXC

SEQ ID NO: 4571 - protein, 20 aa, Artificial Sequence
  Synthetically generated peptide
  VARIANT (1)...(20): Xaa = Any Amino Acid
PGTCGEICAYAAXXXCTGCX

SEQ ID NO: 4572 - protein, 19 aa, Artificial Sequence
  Synthetically generated peptide
  VARIANT (1)...(19): Xaa = Any Amino Acid
PGTCGEICAYAAXXCXTGC

SEQ ID NO: 4573 - protein, 20 aa, Artificial Sequence
  Synthetically generated peptide
  VARIANT (1)...(20): Xaa = Any Amino Acid
PGTCGEICAYAAXXCXXTGC

SEQ ID NO: 4574 - protein, 20 aa, Artificial Sequence
  Synthetically generated peptide
  VARIANT (1)...(20): Xaa = Any Amino Acid
PGTCGEICAYAAXXCXTXGC

SEQ ID NO: 4575 - protein, 20 aa, Artificial Sequence
  Synthetically generated peptide
  VARIANT (1)...(20): Xaa = Any Amino Acid
PGTCGEICAYAAXXCXTGXC

SEQ ID NO: 4576 - protein, 20 aa, Artificial Sequence
  Synthetically generated peptide
  VARIANT (1)...(20): Xaa = Any Amino Acid
PGTCGEICAYAAXXCXTGCX

SEQ ID NO: 4577 - protein, 19 aa, Artificial Sequence
  Synthetically generated peptide
  VARIANT (1)...(19): Xaa = Any Amino Acid
PGTCGEICAYAAXXCTXGC

SEQ ID NO: 4578 - protein, 20 aa, Artificial Sequence
  Synthetically generated peptide
  VARIANT (1)...(20): Xaa = Any Amino Acid
PGTCGEICAYAAXXCTXXGC

SEQ ID NO: 4579 - protein, 20 aa, Artificial Sequence
  Synthetically generated peptide
  VARIANT (1)...(20): Xaa = Any Amino Acid
PGTCGEICAYAAXXCTXGXC

SEQ ID NO: 4580 - protein, 20 aa, Artificial Sequence
  Synthetically generated peptide
  VARIANT (1)...(20): Xaa = Any Amino Acid
PGTCGEICAYAAXXCTXGCX

SEQ ID NO: 4581 - protein, 19 aa, Artificial Sequence
  Synthetically generated peptide
  VARIANT (1)...(19): Xaa = Any Amino Acid
PGTCGEICAYAAXXCTGXC

SEQ ID NO: 4582 - protein, 20 aa, Artificial Sequence
  Synthetically generated peptide
  VARIANT (1)...(20): Xaa = Any Amino Acid
PGTCGEICAYAAXXCTGXXC

SEQ ID NO: 4583 - protein, 20 aa, Artificial Sequence
  Synthetically generated peptide
  VARIANT (1)...(20): Xaa = Any Amino Acid
PGTCGEICAYAAXXCTGXCX

SEQ ID NO: 4584 - protein, 19 aa, Artificial Sequence
  Synthetically generated peptide
  VARIANT (1)...(19): Xaa = Any Amino Acid
PGTCGEICAYAAXXCTGCX

SEQ ID NO: 4585 - protein, 20 aa, Artificial Sequence
  Synthetically generated peptide
  VARIANT (1)...(20): Xaa = Any Amino Acid
PGTCGEICAYAAXXCTGCXX

SEQ ID NO: 4586 - protein, 18 aa, Artificial Sequence
  Synthetically generated peptide
  VARIANT (1)...(18): Xaa = Any Amino Acid
PGTCGEICAYAAXCXTGC

SEQ ID NO: 4587 - protein, 19 aa, Artificial Sequence
  Synthetically generated peptide
  VARIANT (1)...(19): Xaa = Any Amino Acid
PGTCGEICAYAAXCXXTGC

SEQ ID NO: 4588 - protein, 20 aa, Artificial Sequence
  Synthetically generated peptide
  VARIANT (1)...(20): Xaa = Any Amino Acid
PGTCGEICAYAAXCXXXTGC

SEQ ID NO: 4589 - protein, 20 aa, Artificial Sequence
  Synthetically generated peptide
  VARIANT (1)...(20): Xaa = Any Amino Acid
PGTCGEICAYAAXCXXTXGC

SEQ ID NO: 4590 - protein, 20 aa, Artificial Sequence
  Synthetically generated peptide
  VARIANT (1)...(20): Xaa = Any Amino Acid
PGTCGEICAYAAXCXXTGXC

SEQ ID NO: 4591 - protein, 20 aa, Artificial Sequence
  Synthetically generated peptide
  VARIANT (1)...(20): Xaa = Any Amino Acid
PGTCGEICAYAAXCXXTGCX

SEQ ID NO: 4592 - protein, 19 aa, Artificial Sequence
  Synthetically generated peptide
  VARIANT (1)...(19): Xaa = Any Amino Acid
PGTCGEICAYAAXCXTXGC

SEQ ID NO: 4593 - protein, 20 aa, Artificial Sequence
  Synthetically generated peptide
  VARIANT (1)...(20): Xaa = Any Amino Acid
PGTCGEICAYAAXCXTXXGC

SEQ ID NO: 4594 - protein, 20 aa, Artificial Sequence
  Synthetically generated peptide
  VARIANT (1)...(20): Xaa = Any Amino Acid
PGTCGEICAYAAXCXTXGXC

SEQ ID NO: 4595 - protein, 20 aa, Artificial Sequence
  Synthetically generated peptide
  VARIANT (1)...(20): Xaa = Any Amino Acid
PGTCGEICAYAAXCXTXGCX

SEQ ID NO: 4596 - protein, 19 aa, Artificial Sequence
  Synthetically generated peptide
  VARIANT (1)...(19): Xaa = Any Amino Acid
PGTCGEICAYAAXCXTGXC

SEQ ID NO: 4597 - protein, 20 aa, Artificial Sequence
  Synthetically generated peptide
  VARIANT (1)...(20): Xaa = Any Amino Acid
PGTCGEICAYAAXCXTGXXC

SEQ ID NO: 4598 - protein, 20 aa, Artificial Sequence
  Synthetically generated peptide
  VARIANT (1)...(20): Xaa = Any Amino Acid
PGTCGEICAYAAXCXTGXCX

SEQ ID NO: 4599 - protein, 19 aa, Artificial Sequence
  Synthetically generated peptide
  VARIANT (1)...(19): Xaa = Any Amino Acid
PGTCGEICAYAAXCXTGCX

SEQ ID NO: 4600 - protein, 20 aa, Artificial Sequence
  Synthetically generated peptide
  VARIANT (1)...(20): Xaa = Any Amino Acid
PGTCGEICAYAAXCXTGCXX

SEQ ID NO: 4601 - protein, 18 aa, Artificial Sequence
  Synthetically generated peptide
  VARIANT (1)...(18): Xaa = Any Amino Acid
PGTCGEICAYAAXCTXGC

SEQ ID NO: 4602 - protein, 19 aa, Artificial Sequence
  Synthetically generated peptide
  VARIANT (1)...(19): Xaa = Any Amino Acid
PGTCGEICAYAAXCTXXGC

SEQ ID NO: 4603 - protein, 20 aa, Artificial Sequence
  Synthetically generated peptide
  VARIANT (1)...(20): Xaa = Any Amino Acid
PGTCGEICAYAAXCTXXXGC

SEQ ID NO: 4604 - protein, 20 aa, Artificial Sequence
  Synthetically generated peptide
  VARIANT (1)...(20): Xaa = Any Amino Acid
PGTCGEICAYAAXCTXXGXC

SEQ ID NO: 4605 - protein, 20 aa, Artificial Sequence
  Synthetically generated peptide
  VARIANT (1)...(20): Xaa = Any Amino Acid
PGTCGEICAYAAXCTXXGCX

SEQ ID NO: 4606 - protein, 19 aa, Artificial Sequence
  Synthetically generated peptide
  VARIANT (1)...(19): Xaa = Any Amino Acid
PGTCGEICAYAAXCTXGXC

SEQ ID NO: 4607 - protein, 20 aa, Artificial Sequence
  Synthetically generated peptide
  VARIANT (1)...(20): Xaa = Any Amino Acid
PGTCGEICAYAAXCTXGXXC

SEQ ID NO: 4608 - protein, 20 aa, Artificial Sequence
  Synthetically generated peptide
  VARIANT (1)...(20): Xaa = Any Amino Acid
PGTCGEICAYAAXCTXGXCX

SEQ ID NO: 4609 - protein, 19 aa, Artificial Sequence
  Synthetically generated peptide
  VARIANT (1)...(19): Xaa = Any Amino Acid
PGTCGEICAYAAXCTXGCX

SEQ ID NO: 4610 - protein, 20 aa, Artificial Sequence
  Synthetically generated peptide
  VARIANT (1)...(20): Xaa = Any Amino Acid
PGTCGEICAYAAXCTXGCXX

SEQ ID NO: 4611 - protein, 18 aa, Artificial Sequence
  Synthetically generated peptide
  VARIANT (1)...(18): Xaa = Any Amino Acid
PGTCGEICAYAAXCTGXC

SEQ ID NO: 4612 - protein, 19 aa, Artificial Sequence
  Synthetically generated peptide
  VARIANT (1)...(19): Xaa = Any Amino Acid
PGTCGEICAYAAXCTGXXC

SEQ ID NO: 4613 - protein, 20 aa, Artificial Sequence
  Synthetically generated peptide
  VARIANT (1)...(20): Xaa = Any Amino Acid
PGTCGEICAYAAXCTGXXXC

SEQ ID NO: 4614 - protein, 20 aa, Artificial Sequence
  Synthetically generated peptide
  VARIANT (1)...(20): Xaa = Any Amino Acid
PGTCGEICAYAAXCTGXXCX

SEQ ID NO: 4615 - protein, 19 aa, Artificial Sequence
  Synthetically generated peptide
  VARIANT (1)...(19): Xaa = Any Amino Acid
PGTCGEICAYAAXCTGXCX

SEQ ID NO: 4616 - protein, 20 aa, Artificial Sequence
  Synthetically generated peptide
  VARIANT (1)...(20): Xaa = Any Amino Acid
PGTCGEICAYAAXCTGXCXX

SEQ ID NO: 4617 - protein, 18 aa, Artificial Sequence
  Synthetically generated peptide
  VARIANT (1)...(18): Xaa = Any Amino Acid
PGTCGEICAYAAXCTGCX

SEQ ID NO: 4618 - protein, 19 aa, Artificial Sequence
  Synthetically generated peptide
  VARIANT (1)...(19): Xaa = Any Amino Acid
PGTCGEICAYAAXCTGCXX

SEQ ID NO: 4619 - protein, 20 aa, Artificial Sequence
  Synthetically generated peptide
  VARIANT (1)...(20): Xaa = Any Amino Acid
PGTCGEICAYAAXCTGCXXX

SEQ ID NO: 4620 - protein, 17 aa, Artificial Sequence
  Synthetically generated peptide
  VARIANT (1)...(17): Xaa = Any Amino Acid
PGTCGEICAYAACXTGC

SEQ ID NO: 4621 - protein, 18 aa, Artificial Sequence
  Synthetically generated peptide
  VARIANT (1)...(18): Xaa = Any Amino Acid
PGTCGEICAYAACXXTGC

SEQ ID NO: 4622 - protein, 19 aa, Artificial Sequence
  Synthetically generated peptide
  VARIANT (1)...(19): Xaa = Any Amino Acid
PGTCGEICAYAACXXXTGC

SEQ ID NO: 4623 - protein, 20 aa, Artificial Sequence
  Synthetically generated peptide
  VARIANT (1)...(20): Xaa = Any Amino Acid
PGTCGEICAYAACXXXXTGC

SEQ ID NO: 4624 - protein, 20 aa, Artificial Sequence
  Synthetically generated peptide
  VARIANT (1)...(20): Xaa = Any Amino Acid
PGTCGEICAYAACXXXTXGC

SEQ ID NO: 4625 - protein, 20 aa, Artificial Sequence
  Synthetically generated peptide
  VARIANT (1)...(20): Xaa = Any Amino Acid
PGTCGEICAYAACXXXTGXC

SEQ ID NO: 4626 - protein, 20 aa, Artificial Sequence
  Synthetically generated peptide
  VARIANT (1)...(20): Xaa = Any Amino Acid
PGTCGEICAYAACXXXTGCX

SEQ ID NO: 4627 - protein, 19 aa, Artificial Sequence
  Synthetically generated peptide
  VARIANT (1)...(19): Xaa = Any Amino Acid
PGTCGEICAYAACXXTXGC

SEQ ID NO: 4628 - protein, 20 aa, Artificial Sequence
  Synthetically generated peptide
  VARIANT (1)...(20): Xaa = Any Amino Acid
PGTCGEICAYAACXXTXXGC

SEQ ID NO: 4629 - protein, 20 aa, Artificial Sequence
  Synthetically generated peptide
  VARIANT (1)...(20): Xaa = Any Amino Acid
PGTCGEICAYAACXXTXGXC

SEQ ID NO: 4630 - protein, 20 aa, Artificial Sequence
  Synthetically generated peptide
  VARIANT (1)...(20): Xaa = Any Amino Acid
PGTCGEICAYAACXXTXGCX

SEQ ID NO: 4631 - protein, 19 aa, Artificial Sequence
  Synthetically generated peptide
  VARIANT (1)...(19): Xaa = Any Amino Acid
PGTCGEICAYAACXXTGXC

SEQ ID NO: 4632 - protein, 20 aa, Artificial Sequence
  Synthetically generated peptide
  VARIANT (1)...(20): Xaa = Any Amino Acid
PGTCGEICAYAACXXTGXXC

SEQ ID NO: 4633 - protein, 20 aa, Artificial Sequence
  Synthetically generated peptide
  VARIANT (1)...(20): Xaa = Any Amino Acid
PGTCGEICAYAACXXTGXCX

SEQ ID NO: 4634 - protein, 19 aa, Artificial Sequence
  Synthetically generated peptide
  VARIANT (1)...(19): Xaa = Any Amino Acid
PGTCGEICAYAACXXTGCX

SEQ ID NO: 4635 - protein, 20 aa, Artificial Sequence
  Synthetically generated peptide
  VARIANT (1)...(20): Xaa = Any Amino Acid
PGTCGEICAYAACXXTGCXX

SEQ ID NO: 4636 - protein, 18 aa, Artificial Sequence
  Synthetically generated peptide
  VARIANT (1)...(18): Xaa = Any Amino Acid
PGTCGEICAYAACXTXGC

SEQ ID NO: 4637 - protein, 19 aa, Artificial Sequence
  Synthetically generated peptide
  VARIANT (1)...(19): Xaa = Any Amino Acid
PGTCGEICAYAACXTXXGC

SEQ ID NO: 4638 - protein, 20 aa, Artificial Sequence
  Synthetically generated peptide
  VARIANT (1)...(20): Xaa = Any Amino Acid
PGTCGEICAYAACXTXXXGC

SEQ ID NO: 4639 - protein, 20 aa, Artificial Sequence
  Synthetically generated peptide
  VARIANT (1)...(20): Xaa = Any Amino Acid
PGTCGEICAYAACXTXXGXC

SEQ ID NO: 4640 - protein, 20 aa, Artificial Sequence
  Synthetically generated peptide
  VARIANT (1)...(20): Xaa = Any Amino Acid
PGTCGEICAYAACXTXXGCX

SEQ ID NO: 4641 - protein, 19 aa, Artificial Sequence
  Synthetically generated peptide
  VARIANT (1)...(19): Xaa = Any Amino Acid
PGTCGEICAYAACXTXGXC

SEQ ID NO: 4642 - protein, 20 aa, Artificial Sequence
  Synthetically generated peptide
  VARIANT (1)...(20): Xaa = Any Amino Acid
PGTCGEICAYAACXTXGXXC

SEQ ID NO: 4643 - protein, 20 aa, Artificial Sequence
  Synthetically generated peptide
  VARIANT (1)...(20): Xaa = Any Amino Acid
PGTCGEICAYAACXTXGXCX

SEQ ID NO: 4644 - protein, 19 aa, Artificial Sequence
  Synthetically generated peptide
  VARIANT (1)...(19): Xaa = Any Amino Acid
PGTCGEICAYAACXTXGCX

SEQ ID NO: 4645 - protein, 20 aa, Artificial Sequence
  Synthetically generated peptide
  VARIANT (1)...(20): Xaa = Any Amino Acid
PGTCGEICAYAACXTXGCXX

SEQ ID NO: 4646 - protein, 18 aa, Artificial Sequence
  Synthetically generated peptide
  VARIANT (1)...(18): Xaa = Any Amino Acid
PGTCGEICAYAACXTGXC

SEQ ID NO: 4647 - protein, 19 aa, Artificial Sequence
  Synthetically generated peptide
  VARIANT (1)...(19): Xaa = Any Amino Acid
PGTCGEICAYAACXTGXXC

SEQ ID NO: 4648 - protein, 20 aa, Artificial Sequence
  Synthetically generated peptide
  VARIANT (1)...(20): Xaa = Any Amino Acid
PGTCGEICAYAACXTGXXXC

SEQ ID NO: 4649 - protein, 20 aa, Artificial Sequence
  Synthetically generated peptide
  VARIANT (1)...(20): Xaa = Any Amino Acid
PGTCGEICAYAACXTGXXCX

SEQ ID NO: 4650 - protein, 19 aa, Artificial Sequence
  Synthetically generated peptide
  VARIANT (1)...(19): Xaa = Any Amino Acid
PGTCGEICAYAACXTGXCX

SEQ ID NO: 4651 - protein, 20 aa, Artificial Sequence
  Synthetically generated peptide
  VARIANT (1)...(20): Xaa = Any Amino Acid
PGTCGEICAYAACXTGXCXX

SEQ ID NO: 4652 - protein, 18 aa, Artificial Sequence
  Synthetically generated peptide
  VARIANT (1)...(18): Xaa = Any Amino Acid
PGTCGEICAYAACXTGCX

SEQ ID NO: 4653 - protein, 19 aa, Artificial Sequence
  Synthetically generated peptide
  VARIANT (1)...(19): Xaa = Any Amino Acid
PGTCGEICAYAACXTGCXX

SEQ ID NO: 4654 - protein, 20 aa, Artificial Sequence
  Synthetically generated peptide
  VARIANT (1)...(20): Xaa = Any Amino Acid
PGTCGEICAYAACXTGCXXX

SEQ ID NO: 4655 - protein, 17 aa, Artificial Sequence
  Synthetically generated peptide
  VARIANT (1)...(17): Xaa = Any Amino Acid
PGTCGEICAYAACTXGC

SEQ ID NO: 4656 - protein, 18 aa, Artificial Sequence
  Synthetically generated peptide
  VARIANT (1)...(18): Xaa = Any Amino Acid
PGTCGEICAYAACTXXGC

SEQ ID NO: 4657 - protein, 19 aa, Artificial Sequence
  Synthetically generated peptide
  VARIANT (1)...(19): Xaa = Any Amino Acid
PGTCGEICAYAACTXXXGC

SEQ ID NO: 4658 - protein, 20 aa, Artificial Sequence
  Synthetically generated peptide
  VARIANT (1)...(20): Xaa = Any Amino Acid
PGTCGEICAYAACTXXXXGC

SEQ ID NO: 4659 - protein, 20 aa, Artificial Sequence
  Synthetically generated peptide
  VARIANT (1)...(20): Xaa = Any Amino Acid
PGTCGEICAYAACTXXXGXC

SEQ ID NO: 4660 - protein, 20 aa, Artificial Sequence
  Synthetically generated peptide
  VARIANT (1)...(20): Xaa = Any Amino Acid
PGTCGEICAYAACTXXXGCX

SEQ ID NO: 4661 - protein, 19 aa, Artificial Sequence
  Synthetically generated peptide
  VARIANT (1)...(19): Xaa = Any Amino Acid
PGTCGEICAYAACTXXGXC

SEQ ID NO: 4662 - protein, 20 aa, Artificial Sequence
  Synthetically generated peptide
  VARIANT (1)...(20): Xaa = Any Amino Acid
PGTCGEICAYAACTXXGXXC

SEQ ID NO: 4663 - protein, 20 aa, Artificial Sequence
  Synthetically generated peptide
  VARIANT (1)...(20): Xaa = Any Amino Acid
PGTCGEICAYAACTXXGXCX

SEQ ID NO: 4664 - protein, 19 aa, Artificial Sequence
  Synthetically generated peptide
  VARIANT (1)...(19): Xaa = Any Amino Acid
PGTCGEICAYAACTXXGCX

SEQ ID NO: 4665 - protein, 20 aa, Artificial Sequence
  Synthetically generated peptide
  VARIANT (1)...(20): Xaa = Any Amino Acid
PGTCGEICAYAACTXXGCXX

SEQ ID NO: 4666 - protein, 18 aa, Artificial Sequence
  Synthetically generated peptide
  VARIANT (1)...(18): Xaa = Any Amino Acid
PGTCGEICAYAACTXGXC

SEQ ID NO: 4667 - protein, 19 aa, Artificial Sequence
  Synthetically generated peptide
  VARIANT (1)...(19): Xaa = Any Amino Acid
PGTCGEICAYAACTXGXXC

SEQ ID NO: 4668 - protein, 20 aa, Artificial Sequence
  Synthetically generated peptide
  VARIANT (1)...(20): Xaa = Any Amino Acid
PGTCGEICAYAACTXGXXXC

SEQ ID NO: 4669 - protein, 20 aa, Artificial Sequence
  Synthetically generated peptide
  VARIANT (1)...(20): Xaa = Any Amino Acid
PGTCGEICAYAACTXGXXCX

SEQ ID NO: 4670 - protein, 19 aa, Artificial Sequence
  Synthetically generated peptide
  VARIANT (1)...(19): Xaa = Any Amino Acid
PGTCGEICAYAACTXGXCX

SEQ ID NO: 4671 - protein, 20 aa, Artificial Sequence
  Synthetically generated peptide
  VARIANT (1)...(20): Xaa = Any Amino Acid
PGTCGEICAYAACTXGXCXX

SEQ ID NO: 4672 - protein, 18 aa, Artificial Sequence
  Synthetically generated peptide
  VARIANT (1)...(18): Xaa = Any Amino Acid
PGTCGEICAYAACTXGCX

SEQ ID NO: 4673 - protein, 19 aa, Artificial Sequence
  Synthetically generated peptide
  VARIANT (1)...(19): Xaa = Any Amino Acid
PGTCGEICAYAACTXGCXX

SEQ ID NO: 4674 - protein, 20 aa, Artificial Sequence
  Synthetically generated peptide
  VARIANT (1)...(20): Xaa = Any Amino Acid
PGTCGEICAYAACTXGCXXX

SEQ ID NO: 4675 - protein, 17 aa, Artificial Sequence
  Synthetically generated peptide
  VARIANT (1)...(17): Xaa = Any Amino Acid
PGTCGEICAYAACTGXC

SEQ ID NO: 4676 - protein, 18 aa, Artificial Sequence
  Synthetically generated peptide
  VARIANT (1)...(18): Xaa = Any Amino Acid
PGTCGEICAYAACTGXXC

SEQ ID NO: 4677 - protein, 19 aa, Artificial Sequence
  Synthetically generated peptide
  VARIANT (1)...(19): Xaa = Any Amino Acid
PGTCGEICAYAACTGXXXC

SEQ ID NO: 4678 - protein, 20 aa, Artificial Sequence
  Synthetically generated peptide
  VARIANT (1)...(20): Xaa = Any Amino Acid
PGTCGEICAYAACTGXXXXC

SEQ ID NO: 4679 - protein, 20 aa, Artificial Sequence
  Synthetically generated peptide
  VARIANT (1)...(20): Xaa = Any Amino Acid
PGTCGEICAYAACTGXXXCX

SEQ ID NO: 4680 - protein, 19 aa, Artificial Sequence
  Synthetically generated peptide
  VARIANT (1)...(19): Xaa = Any Amino Acid
PGTCGEICAYAACTGXXCX

SEQ ID NO: 4681 - protein, 20 aa, Artificial Sequence
  Synthetically generated peptide
  VARIANT (1)...(20): Xaa = Any Amino Acid
PGTCGEICAYAACTGXXCXX

SEQ ID NO: 4682 - protein, 18 aa, Artificial Sequence
  Synthetically generated peptide
  VARIANT (1)...(18): Xaa = Any Amino Acid
PGTCGEICAYAACTGXCX

SEQ ID NO: 4683 - protein, 19 aa, Artificial Sequence
  Synthetically generated peptide
  VARIANT (1)...(19): Xaa = Any Amino Acid
PGTCGEICAYAACTGXCXX

SEQ ID NO: 4684 - protein, 20 aa, Artificial Sequence
  Synthetically generated peptide
  VARIANT (1)...(20): Xaa = Any Amino Acid
PGTCGEICAYAACTGXCXXX

SEQ ID NO: 4685 - protein, 17 aa, Artificial Sequence
  Synthetically generated peptide
  VARIANT (1)...(17): Xaa = Any Amino Acid
PGTCGEICAYAACTGCX

SEQ ID NO: 4686 - protein, 18 aa, Artificial Sequence
  Synthetically generated peptide
  VARIANT (1)...(18): Xaa = Any Amino Acid
PGTCGEICAYAACTGCXX

SEQ ID NO: 4687 - protein, 19 aa, Artificial Sequence
  Synthetically generated peptide
  VARIANT (1)...(19): Xaa = Any Amino Acid
PGTCGEICAYAACTGCXXX

SEQ ID NO: 4688 - protein, 20 aa, Artificial Sequence
  Synthetically generated peptide
  VARIANT (1)...(20): Xaa = Any Amino Acid
PGTCGEICAYAACTGCXXXX

SEQ ID NO: 4689 - protein, 15 aa, Homo sapiens
PGTCEICAYAACTGC

SEQ ID NO: 4690 - protein, 15 aa, Artificial Sequence
  Synthetically generated peptide
PGTCEICASAACTGC

SEQ ID NO: 4691 - protein, 15 aa, Artificial Sequence
  Synthetically generated peptide
PGTCEICATAACTGC

SEQ ID NO: 4692 - protein, 15 aa, Artificial Sequence
  Synthetically generated peptide
PGTCEICANAACTGC

SEQ ID NO: 4693 - protein, 15 aa, Artificial Sequence
  Synthetically generated peptide
PGTCEICAQAACTGC

SEQ ID NO: 4694 - protein, 15 aa, Artificial Sequence
  Synthetically generated peptide
PGTCEICARAACTGC

SEQ ID NO: 4695 - protein, 15 aa, Artificial Sequence
  Synthetically generated peptide
PGTCEICAEAACTGC

SEQ ID NO: 4696 - protein, 15 aa, Artificial Sequence
  Synthetically generated peptide
PGTCEICADAACTGC

SEQ ID NO: 4697 - protein, 15 aa, Artificial Sequence
  Synthetically generated peptide
PGTCEICAGAACTGC

SEQ ID NO: 4698 - protein, 15 aa, Artificial Sequence
  Synthetically generated peptide
PGTCEICAAAACTGC

SEQ ID NO: 4699 - protein, 15 aa, Artificial Sequence
  Synthetically generated peptide
PGTCEICAMAACTGC

SEQ ID NO: 4700 - protein, 15 aa, Artificial Sequence
  Synthetically generated peptide
PGTCEICAIAACTGC

SEQ ID NO: 4701 - protein, 13 aa, Artificial Sequence
  Synthetically generated peptide
PGTCEICAACTGC

SEQ ID NO: 4702 - protein, 15 aa, Artificial Sequence
  Synthetically generated peptide
PGTCEICAVAACTGC

SEQ ID NO: 4703 - protein, 15 aa, Artificial Sequence
  Synthetically generated peptide
PGTCEICAHAACTGC

SEQ ID NO: 4704 - protein, 16 aa, Artificial Sequence
  Synthetically generated peptide
PGTCEGICAYAACTGC

SEQ ID NO: 4705 - protein, 16 aa, Artificial Sequence
  Synthetically generated peptide
PGTCEIGCAYAACTGC

SEQ ID NO: 4706 - protein, 16 aa, Artificial Sequence
  Synthetically generated peptide
PGTCEICGAYAACTGC

SEQ ID NO: 4707 - protein, 16 aa, Artificial Sequence
  Synthetically generated peptide
PGTCEICAGYAACTGC

SEQ ID NO: 4708 - protein, 16 aa, Artificial Sequence
  Synthetically generated peptide
PGTCEICAYGAACTGC

SEQ ID NO: 4709 - protein, 16 aa, Artificial Sequence
  Synthetically generated peptide
PGTCEICAYAGACTGC

SEQ ID NO: 4710 - protein, 16 aa, Artificial Sequence
  Synthetically generated peptide
PGTCEICAYAAGCTGC

SEQ ID NO: 4711 - protein, 16 aa, Artificial Sequence
  Synthetically generated peptide
PGTCEICAYAACGTGC

SEQ ID NO: 4712 - protein, 16 aa, Artificial Sequence
  Synthetically generated peptide
PGTCEICAYAACTGGC

SEQ ID NO: 4713 - protein, 16 aa, Artificial Sequence
  Synthetically generated peptide
PGTCAEICAYAACTGC

SEQ ID NO: 4714 - protein, 16 aa, Artificial Sequence
  Synthetically generated peptide
PGTCEAICAYAACTGC

SEQ ID NO: 4715 - protein, 16 aa, Artificial Sequence
  Synthetically generated peptide
PGTCEIACAYAACTGC

SEQ ID NO: 4716 - protein, 16 aa, Artificial Sequence
  Synthetically generated peptide
PGTCEICAAYAACTGC

SEQ ID NO: 4717 - protein, 16 aa, Artificial Sequence
  Synthetically generated peptide
PGTCEICAYAAACTGC

SEQ ID NO: 4718 - protein, 16 aa, Artificial Sequence
  Synthetically generated peptide
PGTCEICAYAACATGC

SEQ ID NO: 4719 - protein, 16 aa, Artificial Sequence
  Synthetically generated peptide
PGTCEICAYAACTAGC

SEQ ID NO: 4720 - protein, 16 aa, Artificial Sequence
  Synthetically generated peptide
PGTCEICAYAACTGAC

SEQ ID NO: 4721 - protein, 17 aa, Artificial Sequence
  Synthetically generated peptide
PGTCAEICAAYAACTGC

SEQ ID NO: 4722 - protein, 17 aa, Artificial Sequence
  Synthetically generated peptide
PGTCEAICAAYAACTGC

SEQ ID NO: 4723 - protein, 17 aa, Artificial Sequence
  Synthetically generated peptide
PGTCEIACAAYAACTGC

SEQ ID NO: 4724 - protein, 15 aa, Artificial Sequence
  Synthetically generated peptide
SHTCEICAFAACAGC

SEQ ID NO: 4725 - protein, 14 aa, Artificial Sequence
  Synthetically generated peptide
STCEICAYAACAGC

SEQ ID NO: 4726 - protein, 15 aa, Artificial Sequence
  Synthetically generated peptide
PNTCEICAYAACTGC

SEQ ID NO: 4727 - protein, 16 aa, Artificial Sequence
  Synthetically generated peptide
PDPCEICANAACTGCL

SEQ ID NO: 4728 - protein, 15 aa, Artificial Sequence
  Synthetically generated peptide
YDECEICMFAACTGC

SEQ ID NO: 4729 - protein, 13 aa, Artificial Sequence
  Synthetically generated peptide
VCEICAFAACTGC

SEQ ID NO: 4730 - protein, 15 aa, Artificial Sequence
  Synthetically generated peptide
PDVCDVCAFAACSGC

SEQ ID NO: 4731 - protein, 15 aa, Artificial Sequence
  Synthetically generated peptide
LDLCEICAFAACTGC

SEQ ID NO: 4732 - protein, 15 aa, Artificial Sequence
  Synthetically generated peptide
VDVCEICAFAACTGC

SEQ ID NO: 4733 - protein, 15 aa, Artificial Sequence
  Synthetically generated peptide
LDICEICAFAACTGC

1. A method for increasing GC-C Receptor activity, the method comprising administering a composition comprising a chymotrypsin inhibitor.

2-3. (canceled)

4. A method for increasing intestinal motility, the method comprising administering a composition comprising a chymotrypsin inhibitor.

5-7. (canceled)

8. The method of claim 20 wherein the gastrointestinal disorder is selected from the group consisting of: constipation, a gastrointestinal motility disorder, irritable bowel syndrome, a functional gastrointestinal disorder, gastroesophageal reflux disease, functional heartburn, dyspepsia, functional dyspepsia, nonulcer dyspepsia, gastroparesis, chronic intestinal pseudo-obstruction, and colonic pseudo-obstruction.

9-11. (canceled)

12. The method of any of claim 1 further comprising administering guanylin or a biologically active variant or fragment thereof.

13. A pharmaceutical composition comprising a chymotrypsin inhibitor and a pharmaceutically acceptable carrier.

14. The composition of claim 10 further comprising guanylin or a biologically active variant or fragment thereof.

15. The composition of claim 14 further comprising a GC-C Receptor agonist.

16. The method of claim 1 further comprising administering a GC-C Receptor agonist.

17. (canceled)

18. The method of claim 1 wherein the disorder is congestive heart failure.

19. The method of claim 1 wherein the disorder is prostatic hyperplasia.

20. The method of claim 1 wherein the disorder is a gastrointestinal disorder.

21. The method of claim 1 wherein the disorder is obesity.
